(19) United States
(12) Patent Application Publication
(10) Pub. No.: US 2024/0026330 A1
(43) Pub. Date: Jan. 25, 2024

(54) MITOCHONDRIAL PROTEIN TARGETING ENGINEERED DEUBIQUITINASES AND METHODS OF USE THEREOF

(71) Applicant: FLUX THERAPEUTICS, INC., NEW YORK, NY (US)

(72) Inventors: Andreas LOEW, MATTAPOISETT, MA (US); Samuel W. HALL, Brooklyn, NY (US)

(21) Appl. No.: 18/251,850

(22) PCT Filed: Nov. 5, 2021
(86) PCT No.: PCT/US2021/058286

§ 371 Date: May 4, 2023

Related U.S. Application Data
(60) Provisional application No. 63/110,625, filed on Nov. 6, 2020.

(51) Int. Cl. C12N 9/48; A61P 43/00; C07K 16/18; C12N 15/86

(52) U.S. Cl. CPC C12N 9/485; A61P 43/00; C07K 16/18; C12N 15/86; C12Y 304/19012

(57) ABSTRACT

Provided herein are fusion protein comprising: an effector domain comprising a catalytic domain of a deubiquitinase, or a functional fragment or functional variant thereof; and a targeting domain comprising a moiety that specifically binds a mitochondrial protein. Also provided herein are methods of using the fusion proteins to treat a disease, including genetic diseases.

### CROSS-REFERENCE TO RELATED APPLICATIONS

[0001] This application claims the benefit under 35 U.S.C. § 119(e) of U.S. Provisional Patent Application No. 63/110,625, filed Nov. 6, 2020, the entire disclosure of which is incorporated herein by reference.

### 1. FIELD

[0002] This disclosure relates to fusion proteins comprising an effector domain comprising a catalytic domain of a deubiquitinase, or a functional fragment or functional variant thereof; and a targeting domain comprising a moiety that specifically binds a target mitochondrial protein. The disclosure further relates to therapeutic methods of using the same.

### 2. BACKGROUND

[0003] A subset of genetic diseases are associated with a decrease in the level of expression of a functional mitochondrial protein or a decrease in the stability of a mitochondrial protein. For example, haploinsufficiency genetic diseases are caused by the presence a single copy of a wild-type allele in heterozygous combination with a loss of function variant allele, wherein the level of functional protein expressed is insufficient to produce the standard phenotype. Haploinsufficiency can arise from a de novo or inherited loss-of-function mutation in the variant allele, such that it produces little or no functional protein. Despite recent developments in gene therapy, there are still no curative treatments for these diseases, and treatment typically centers on the management of symptoms. Therefore, new treatments are needed for diseases, e.g., genetic diseases, that are associated with decreased functional mitochondrial protein expression or stability.

### 3. SUMMARY

[0004] Provided herein are, inter alia, engineered deubiquitinases (enDubs) that comprise a targeting moiety that specifically binds a mitochondrial target protein and a catalytic domain of a deubiquitinase. The targeting moiety directs that deubiquitinase catalytic domain to the specific target mitochondrial protein for deubiquitination. The fusion proteins described herein are particularly useful in methods of treating genetic diseases, particularly those associated with or caused by decreased expression or stability of a specific mitochondrial protein.

[0005] In one aspect, provided herein are fusion proteins comprising: an effector domain comprising a catalytic domain of a deubiquitinase, or a functional fragment or functional variant thereof; and a targeting domain comprising a targeting moiety that specifically binds a mitochondrial protein.

[0006] In some embodiments, the deubiquitinase is a cysteine protease or a metalloprotease.

[0007] In some embodiments, the deubiquitinase is a cysteine protease. In some embodiments, the cysteine protease is a ubiquitin-specific protease (USP), a ubiquitin C-terminal hydrolase (UCH), a Machado-Josephin domain protease (MJD), an ovarian tumour protease (OTU), a MINDY protease, or a ZUFSP protease.

[0008] In some embodiments, the cysteine protease is a USP. In some embodiments, the USP is USP1, USP2, USP3, USP4, USP5, USP6, USP7, USP8, USP9X, USP9Y, USP10, USP11, USP12, USP13, USP14, USP15, USP16, USP17, USP17L2, USP17L3, USP17L4, USP17L5, USP17L7, USP17L8, USP18, USP19, USP20, USP21, USP22, USP23, USP24, USP25, USP26, USP27X, USP28, USP29, USP30, USP31, USP32, USP33, USP34, USP35, USP36, USP37, USP38, USP39, USP40, USP41, USP42, USP43, USP44, USP45, or USP46.

[0009] In some embodiments, the cysteine protease is a UCH. In some embodiments, the UCH is BAP1, UCHL1, UCHL3, or UCHL5.

[0010] In some embodiments, the cysteine protease is a MJD. In some embodiments, the MJD is ATXN3 or ATXN3L.

[0011] In some embodiments, the cysteine protease is a OTU. In some embodiments, the OTU is OTUB1 or OTUB2.

[0012] In some embodiments, the cysteine protease is a MINDY. In some embodiments, the MINDY is MINDY1, MINDY2, MINDY3, or MINDY4.

[0013] In some embodiments, the cysteine protease is a ZUFSP. In some embodiments, the ZUFSP is ZUP1.

[0014] In some embodiments, the deubiquitinase is a metalloprotease. In some embodiments, the metalloprotease is a Jab1/Mov34/Mpr1 Pad1 N-terminal+ (MPN+) (JAMM) domain protease.

[0015] In some embodiments, the deubiquitinase comprises an amino acid sequence at least 80%, 81%, 82%, 83%, 84%, 85%, 86%, 87%, 88%, 89%, 90%, 91%, 92%, 93%, 94%, 95%, 96%, 97%, 98%, 99%, or 100% identical to the amino acid sequence of any one of SEQ ID NOS: 1-112.

[0016] In some embodiments, the catalytic domain comprises a catalytic domain derived from a deubiquitinase at least 80%, 81%, 82%, 83%, 84%, 85%, 86%, 87%, 88%, 89%, 90%, 91%, 92%, 93%, 94%, 95%, 96%, 97%, 98%, 99%, or 100% identical to the amino acid sequence of any one of SEQ ID NOS: 1-112.

[0017] In some embodiments, the catalytic domain comprises an amino acid sequence at least 80%, 81%, 82%, 83%, 84%, 85%, 86%, 87%, 88%, 89%, 90%, 91%, 92%, 93%, 94%, 95%, 96%, 97%, 98%, 99%, or 100% identical to the amino acid sequence of any one of SEQ ID NOS: 113-220 or 270.

[0018] In some embodiments, the catalytic domain comprises an amino acid sequence at least 80%, 81%, 82%, 83%, 84%, 85%, 86%, 87%, 88%, 89%, 90%, 91%, 92%, 93%, 94%, 95%, 96%, 97%, 98%, 99%, or 100% identical to the amino acid sequence of SEQ ID NO: 270.

[0019] In some embodiments, the moiety that specifically binds a mitochondrial protein comprises an antibody, or functional fragment or functional variant thereof. In some embodiments, the antibody, or functional fragment or functional variant thereof, comprises a full-length antibody, a single chain variable fragment (scFv), a scFv2, a scFv-Fc, a Fab, a Fab′, a F(ab′)2, a F(v), a VHH, or a (VHH)₂. In some embodiments, the antibody, or functional fragment or functional variant thereof, comprises a VHH or a (VHH)₂.

[0020] In some embodiments, the mitochondrial protein is dynamin-like 120 kDa protein (OPA1), protoporphyrinogen oxidase (PPOX), frataxin (FXN), DNA polymerase subunit gamma-1 (POLG), cytochrome c oxidase subunit 6A2, mitochondrial (COX6A2), ubiquinol-cytochrome-c reductase complex assembly factor 2 (UQCC2), or complex III assembly factor LYRM7 (LYRM7).

[0021] In some embodiments, the mitochondrial protein is dynamin-like 120 kDa protein (OPA1), protoporphyrinogen oxidase (PPOX), frataxin (FXN), or DNA polymerase subunit gamma-1 (POLG).

[0022] In some embodiments, the mitochondrial protein is cytochrome c oxidase subunit 6A2, mitochondrial (COX6A2), ubiquinol-cytochrome-c reductase complex assembly factor 2 (UQCC2), or complex III assembly factor LYRM7 (LYRM7).

[0023] In some embodiments, the mitochondrial protein comprises an amino acid sequence at least 90%, 91%, 92%, 93%, 94%, 95%, 96%, 97%, 98%, 99%, or 100% identical to the amino acid sequence of any one of SEQ ID NOS: 221-224 or 271-273.

[0024] In some embodiments, the effector domain is directly operably connected to the targeting domain. In some embodiments, the effector domain is indirectly operably connected to the targeting domain. In some embodiments, the effector domain is indirectly operably connected to the targeting domain via a peptide linker. In some embodiments, the effector domain is indirectly operably connected to the targeting domain via a peptide linker of sufficient length such that the effector domain and the targeting domain can simultaneous bind the respective target proteins. In some embodiments, the peptide linker comprises the amino acid sequence of any one of SEQ ID NOS: 279-406, or the amino acid sequence of any one of SEQ ID NOS: 279-406 comprising 1, 2, or 3 amino acid modifications. In some embodiments, the peptide linker comprises the amino acid sequence of any one of SEQ ID NOS: 279-288, or the amino acid sequence of any one of SEQ ID NOS: 279-288 comprising 1, 2, or 3 amino acid modifications.

[0025] In some embodiments, the effector domain is operably connected either directly or indirectly to the C terminus of the targeting domain. In some embodiments, the effector moiety is operably connected either directly or indirectly to the N terminus of the targeting domain.

[0026] In one aspect, provided herein are nucleic acid molecules encoding a fusion protein described herein. In some embodiments, the nucleic acid molecule is a DNA molecule. In some embodiments, the nucleic acid molecule is an RNA molecule.

[0027] In one aspect, provided herein are vectors comprising a nucleic acid molecule described herein (e.g., a nucleic acid molecule encoding a fusion protein described herein). In some embodiments, the vector is a plasmid or a viral vector.

[0028] In one aspect, provided herein are viral particles comprising a nucleic acid molecule described herein (e.g., a nucleic acid molecule encoding a fusion protein described herein).

[0029] In one aspect, provided herein are in vitro cell or population of cells comprising a fusion protein described herein, a nucleic acid molecule described herein, or a vector described herein.

[0030] In one aspect, provided herein are pharmaceutical compositions comprising a fusion protein described herein, a nucleic acid described herein, a vector described herein, or a viral particle described herein, and an excipient.

[0031] In one aspect, provided herein are methods of making a fusion protein described herein, comprising introducing into an in vitro cell or population of cells a nucleic acid molecule described herein, a vector described herein, or a viral particle described herein; culturing the cell or population of cells in a culture medium under conditions suitable for expression of the fusion protein, isolating the fusion protein from the culture medium, and optionally purifying the fusion protein.

[0032] In one aspect, provided herein are methods of treating or preventing a disease in a subject comprising administering a fusion protein described herein, a nucleic acid molecule described herein, a vector described herein, a viral particle described herein, or a pharmaceutical composition described herein, to a subject in need thereof. In some embodiments, the subject is human.

[0033] In some embodiments, the disease is associated with decreased expression of a functional version of the mitochondrial protein relative to a non-diseased control. In some embodiments, the disease is associated with decreased stability of a functional version of the mitochondrial protein relative to a non-diseased control. In some embodiments, the disease is associated with increased ubiquitination of the nuclear protein relative to a non-diseased control. In some embodiments, the disease is associated with increased ubiquitination and degradation of the mitochondrial protein relative to a non-diseased control. In some embodiments, the disease is a genetic disease.

[0034] In some embodiments, the disease is selected from the group consisting of optic atrophy 1, Porphyria variegata, Friedreich's Ataxia, Alpers Syndrome mitochondrial complex IV deficiency nuclear type 18 (MC4DN18), mitochondrial complex III deficiency nuclear 7 (MC3DN7), mitochondrial complex III deficiency nuclear 8 (MC3DN8).

[0035] In some embodiments, the target mitochondrial protein is OPA1, and the disease is Optic atrophy 1; the target mitochondrial protein is PPOX, and the disease is Porphyria variegata; the target mitochondrial protein is FXN, and the disease is Friedreich's Ataxia; the target mitochondrial protein is POLG, and the disease is Alpers Syndrome; the target mitochondrial protein is COX6A2, and the disease is mitochondrial complex IV deficiency nuclear type 18 (MC4DN18); the target mitochondrial protein is UQCC2, and the disease is mitochondrial complex III deficiency nuclear 7 (MC3DN7); or the target mitochondrial protein is LYRM7, and the disease is mitochondrial complex III deficiency nuclear 8 (MC3DN8).

[0036] In some embodiments, the disease is a haploinsufficiency disease.

[0037] In some embodiments, the fusion protein is administered at a therapeutically effective dose. In some embodiments, the fusion protein is administered systematically or locally. In some embodiments, the fusion protein is administered intravenously, subcutaneously, or intramuscularly.

[0038] In one aspect, provided herein are fusion proteins described herein, polynucleotides described herein, DNA described herein, RNA described herein, vectors described herein, viral particles described herein, and pharmaceutical compositions described herein for use as a medicament.

[0039] In one aspect, provided herein are fusion proteins described herein, polynucleotides described herein, DNA described herein, RNA described herein, vectors described herein, viral particles described herein, and pharmaceutical compositions described herein for use in treating or inhibiting a genetic disorder.

[0040] In one aspect, provided herein, are fusion proteins comprising: (a) an effector domain comprising a catalytic domain of a deubiquitinase, or a functional fragment or functional variant thereof; and (b) a targeting domain comprising a targeting moiety that specifically binds a mitochondrial protein.

[0041] In some embodiments, the deubiquitinase is a cysteine protease or a metalloprotease.

[0042] In some embodiments, the deubiquitinase is a cysteine protease. In some embodiments, the cysteine protease is a ubiquitin-specific protease (USP), a ubiquitin C-terminal hydrolase (UCH), a Machado-Josephin domain protease (MJD), an ovarian tumour protease (OTU), a MINDY protease, or a ZUFSP protease.

[0043] In some embodiments, the cysteine protease is a USP. In some embodiments, the USP is selected from the group consisting of USP1, USP2, USP3, USP4, USP5, USP6, USP7, USP8, USP9X, USP9Y, USP10, USP11, USP12, USP13, USP14, USP15, USP16, USP17, USP17L2, USP17L3, USP17L4, USP17L5, USP17L7, USP17L8, USP18, USP19, USP20, USP21, USP22, USP23, USP24, USP25, USP26, USP27X, USP28, USP29, USP30, USP31, USP32, USP33, USP34, USP35, USP36, USP37, USP38, USP39, USP40, USP41, USP42, USP43, USP44, USP45, and USP46.

[0044] In some embodiments, the cysteine protease is a UCH. In some embodiments, the UCH is selected from the group consisting of BAP1, UCHL1, UCHL3, and UCHL5.

[0045] In some embodiments, the cysteine protease is a MJD. In some embodiments, the MJD is selected from the group consisting of ATXN3 and ATXN3L.

[0046] In some embodiments, the cysteine protease is a OTU. In some embodiments, the OTU is selected from the group consisting of OTUB1 and OTUB2.

[0047] In some embodiments, the cysteine protease is a MINDY. In some embodiments, the MINDY is selected from the group consisting of MINDY1, MINDY2, MINDY3, and MINDY4.

[0048] In some embodiments, the cysteine protease is a ZUFSP. In some embodiments, the ZUFSP is ZUP1.

[0049] In some embodiments, the deubiquitinase is a metalloprotease. In some embodiments, the metalloprotease is a Jab1/Mov34/Mpr1 Pad1 N-terminal+ (MPN+) (JAMM) domain protease.

[0050] In some embodiments, the deubiquitinase comprises an amino acid sequence at least 80%, 81%, 82%, 83%, 84%, 85%, 86%, 87%, 88%, 89%, 90%, 91%, 92%, 93%, 94%, 95%, 96%, 97%, 98%, 99%, or 100% identical to any one of SEQ ID NOS: 1-112.

[0051] In some embodiments, the catalytic domain comprises a catalytic domain derived from a deubiquitinase at least 80%, 81%, 82%, 83%, 84%, 85%, 86%, 87%, 88%, 89%, 90%, 91%, 92%, 93%, 94%, 95%, 96%, 97%, 98%, 99%, or 100% identical to any one of SEQ ID NOS: 1-112.

[0052] In some embodiments, the catalytic domain comprises an amino acid sequence at least 80%, 81%, 82%, 83%, 84%, 85%, 86%, 87%, 88%, 89%, 90%, 91%, 92%, 93%, 94%, 95%, 96%, 97%, 98%, 99%, or 100% identical to any one of SEQ ID NOS: 113-220.

[0053] In some embodiments, the moiety that specifically binds a mitochondrial protein comprises an antibody, or functional fragment or functional variant thereof. In some embodiments, the antibody, or functional fragment or functional variant thereof, comprises a full-length antibody, a single chain variable fragment (scFv), a scFv2, a scFv-Fc, a Fab, a Fab′, a F(ab′)2, a F(v), or a VHH. In some embodiments, the antibody, or functional fragment or functional variant thereof, comprises a VHH.

[0054] In some embodiments, the mitochondrial protein is selected from the group consisting of dynamin-like 120 kDa protein (OPA1), protoporphyrinogen oxidase (PPOX), frataxin (FXN), and DNA polymerase subunit gamma-1 (POLG).

[0055] In some embodiments, the mitochondrial protein comprises an amino acid sequence at least 90%, 91%, 92%, 93%, 94%, 95%, 96%, 97%, 98%, 99%, or 100% identical to any one of SEQ ID NOS: 221-224.

[0056] In some embodiments, the effector domain is directly fused to the targeting domain. In some embodiments, the effector domain is indirectly fused to the targeting domain. In some embodiments, the effector domain is indirectly fused to the targeting domain via a peptide linker. In some embodiments, the effector domain is indirectly fused to the targeting domain via a peptide linker of sufficient length such that the effector domain and the targeting domain can simultaneous bind the respective target proteins.

[0057] In some embodiments, the effector domain is fused to the C terminus of the targeting domain. In some embodiments, the effector moiety is fused to the N terminus of the targeting domain.

[0058] In one aspect, provided herein are nucleic acid molecules encoding the fusion protein described herein. In some embodiments, the nucleic acid molecule is a DNA molecule. In some embodiments, the nucleic acid molecule is an RNA molecule.

[0059] In one aspect, provided herein are vectors comprising a nucleic acid molecule described herein. In some embodiments, the vector is a plasmid or a viral vector.

[0060] In one aspect, provided herein are viral particles comprising a nucleic acid described herein.

[0061] In one aspect, described herein is an in vitro cell or population of cells comprising a fusion protein described herein, a nucleic acid molecule described herein, or a vector described herein.

[0062] In one aspect, provided herein are pharmaceutical compositions comprising a fusion protein described herein, a nucleic acid molecule described herein, a vector described herein, or a viral particle described herein, and an excipient.

[0063] In one aspect, provided herein are methods of making a fusion protein described herein, comprising (a) introducing into an in vitro cell or population of cells a nucleic acid described herein, a vector described herein, or a viral particle described herein; (b) culturing the cell or population of cells in a culture medium under conditions suitable for expression of the fusion protein, (c) isolating the fusion protein from the culture medium, and (d) optionally purifying the fusion protein.

[0064] In one aspect, provided herein are methods of treating a disease in a subject comprising administering a fusion protein described herein, a nucleic acid described herein, a vector described herein, or a viral particle described herein, or a pharmaceutical composition described herein, to a subject in need thereof.

[0065] In some embodiments, the subject is human.

[0066] In some embodiments, the disease is associated with decreased expression of a functional version of the mitochondrial protein relative to a non-diseased control.

[0067] In some embodiments, the disease is associated with decreased stability of a functional version of the mitochondrial protein relative to a non-diseased control.

[0068] In some embodiments, the disease is associated with increased ubiquitination and degradation of the mitochondrial protein relative to a non-diseased control.

[0069] In some embodiments, the disease is a genetic disease.

[0070] In some embodiments, the disease is optic atrophy 1, Porphyria variegata, Friedreich's Ataxia, and Alpers Syndrome.

[0071] In some embodiments, the disease is a haploinsufficiency disease.

[0072] In some embodiments, the fusion protein is administered at a therapeutically effective dose. In some embodiments, the the fusion protein is administered systematically or locally. In some embodiments, the fusion protein is administered intravenously, subcutaneously, or intramuscularly.

### 4. BRIEF DESCRIPTION OF THE FIGURES

[0073] FIGS. 1A-1D provides a schematic representation of exemplary fusion proteins described herein. FIG. 1A is a schematic of an engineered deubiquitinase comprising from N′ to C′ terminus a VHH that specifically binds a mitochondrial target protein and the catalytic domain of a deubiquitinase. In this specific embodiment, the C-terminus of the VHH is directly connected to the N-terminus of the catalytic domain of the deubiquitinase. FIG. 1B is a schematic of an engineered deubiquitinase comprising from N′ to C′ terminus the catalytic domain of a deubiquitinase that specifically binds a mitochondrial target protein and a VHH that specifically binds a mitochondrial target protein. In this specific embodiment, the C-terminus of the catalytic domain of the deubiquitinase is directly connected to the N-terminus of the VHH. FIG. 1C is a schematic of an engineered deubiquitinase comprising from N′ to C′ terminus a VHH that specifically binds a mitochondrial target protein and the catalytic domain of a deubiquitinase. In this specific embodiment, the C-terminus of the VHH is indirectly connected to the N-terminus of the catalytic domain of the deubiquitinase through a peptide linker. FIG. 1D is a schematic of an engineered deubiquitinase comprising from N′ to C′ terminus the catalytic domain of a deubiquitinase that specifically binds a mitochondrial target protein and a VHH that specifically binds a mitochondrial target protein. In this specific embodiment, the C-terminus of the catalytic domain of the deubiquitinase is indirectly connected to the N-terminus of the VHH through a peptide linker.

[0074] FIG. 2 is a schematic representation of the assay utilized in Example 3, to screen the effect of targeted deubiquitination of different mitochondrial proteins on target protein expression.

[0075] FIG. 3 is a bar graph depicting the fold change in COX6A2 protein expression relative to control (deubiquitinase without the nanobody targeting the alfa-tag).

[0076] FIG. 4 is a bar graph depicting the fold change in UQCC2 protein expression relative to control (deubiquitinase without the nanobody targeting the alfa-tag).

[0077] FIG. 5 is a bar graph depicting the fold change in LYRM7 protein expression relative to control (deubiquitinase without the nanobody targeting the alfa-tag).

### 5. DETAILED DESCRIPTION

### 5.1 Overview

[0078] Ubiquitination is the process by which ubiquitin ligases mediate the addition of ubiquitin, a 76 amino acid regulatory protein, to a substrate protein. Ubiquitination generally starts by the attachment of a single ubiquitin molecule to a lysine amino acid residue of the substrate protein. Mevissen T. et al. Mechanisms of Deubiquitinase Specificity and Regulation Annual Review of Biochemistry 86:1, 159-192 (2017), the entire contents of which is incorporated by reference herein. These monoubiquitination events are abundant and serve various functions. Ubiquitin itself contains seven lysine residues, all of which can be ubiquitinated resulting in polyubiquitinated proteins. Komander, D. et al. Breaking the chains: structure and function of the deubiquitinases. Nat Rev Mol Cell Biol 10, 550-563 (2009), the entire contents of which is incorporated by reference herein. Mono and polyubiquitination can have multiple effects on the substrate protein, including marking the substrate protein for degradation via the proteasome, altering the protein's cellular location, altering the protein's activity, and/or promoting or preventing normal protein interactions. See e.g., Hershko A. et al. The ubiquitin system. Annu Rev Biochem. 67:425-79 (1998); Nandi D, et al. The ubiquitin-proteasome system. J Biosci. March; 31(1):137-55 (2006), the entire contents of each of which is incorporated by reference herein. The effects of ubiquitination can be reversed or prevented by removing the ubiquitin protein(s) from the substrate protein. The removal of ubiquitin from a substrate protein is mediated by deubiquitinase (DUB) proteins. Id.

[0079] Numerous genetic diseases are associated with or caused by a decrease in the level of expression of a functional mitochondrial protein or the stability of the mitochondrial protein. For example, haploinsufficiency genetic diseases are caused by the presence a single copy of a wild-type allele in heterozygous combination with a loss of function variant allele, wherein the level of functional protein expressed is insufficient to produce the standard phenotype. See e.g., Johnson, A. et al, Causes and effects of haploinsufficiency. Biol Rev, 94: 1774-1785 (2019), the entire contents of which is incorporated by reference herein. Haploinsufficiency can arise from a de novo or inherited loss-of-function mutation in the variant allele, such that it produces little or no functional protein. Other genetic disorders result from the ubiquitination and subsequent degradation of variant but functional proteins, resulting in a decrease in expression of the functional protein.

[0080] The present disclosure provides, inter alia, novel fusion proteins that comprise the catalytic domain (or functional fragment thereof) of a deubiquitinase and a targeting moiety, such as a VHH, that specifically binds to a target mitochondrial protein. In some embodiments, decreased expression of a functional version of the target mitochondrial protein or decreased stability of a functional version of the target mitochondrial protein is associated with a disease phenotype. As such, the fusion proteins described herein are particularly useful in the treatment of genetic diseases characterized by a decrease in the level of expression of a functional target mitochondrial protein or the stability of the target mitochondrial protein. Upon expression of the fusion protein by host cells, the catalytic domain of the deubiquitinase will be specifically targeted to the target mitochondrial protein and deubiquitinated, resulting in increased expression of the target mitochondrial protein, e.g., to a level sufficient to alleviate the disease phenotype.

### 5.2 Definitions

[0081] The section headings used herein are for organizational purposes only and are not to be construed as limiting the subject matter described.

[0082] Unless defined otherwise, all technical and scientific terms used herein have the same meaning as commonly understood by one of ordinary skill in the art to which this disclosure is related. For example, the Concise Dictionary of Biomedicine and Molecular Biology, Juo, Pei-Show, 2nd ed., 2002, CRC Press; The Dictionary of Cell and Molecular Biology, 3rd ed., 1999, Academic Press; and the Oxford Dictionary Of Biochemistry And Molecular Biology, Revised, 2000, Oxford University Press, provide one of skill with a general dictionary of many of the terms used in this disclosure.

[0083] It is to be understood that the foregoing general description and the following detailed description are exemplary and explanatory only and are not restrictive of any subject matter claimed. In this application, the use of the singular includes the plural unless specifically stated otherwise.

[0084] It must be noted that, as used in the specification and the appended claims, the singular forms “a,” “an,” and “the” include plural referents unless the context clearly dictates otherwise. Furthermore, use of the term “including” as well as other forms, such as “include,” “includes,” and “included,” is not limiting.

[0085] It is understood that wherever aspects are described herein with the language “comprising,” otherwise analogous aspects described in terms of “consisting of” and/or “consisting essentially of” are also provided.

[0086] The term “and/or” where used herein is to be taken as specific disclosure of each of the two specified features or components with or without the other. Thus, the term “and/or” as used in a phrase such as “A and/or B” herein is intended to include “A and B,” “A or B,” “A” (alone), and “B” (alone). Likewise, the term “and/or” as used in a phrase such as “A, B, and/or C” is intended to encompass each of the following aspects: A, B, and C; A, B, or C; A or C; A or B; B or C; A and C; A and B; B and C; A (alone); B (alone); and C (alone).

[0087] Units, prefixes, and symbols are denoted in their Systéme International de Unites (SI) accepted form. Numeric ranges are inclusive of the numbers defining the range. The headings provided herein are not limitations of the various aspects of the disclosure, which can be had by reference to the specification as a whole. Accordingly, the terms defined immediately below are more fully defined by reference to the specification in its entirety.

[0088] As described herein, any concentration range, percentage range, ratio range or integer range is to be understood to include the value of any integer within the recited range and, when appropriate, fractions thereof (such as one tenth and one hundredth of an integer), unless otherwise indicated.

[0089] The terms “about” or “comprising essentially of” refer to a value or composition that is within an acceptable error range for the particular value or composition as determined by one of ordinary skill in the art, which will depend in part on how the value or composition is measured or determined, i.e., the limitations of the measurement system. For example, “about” or “comprising essentially of” can mean within 1 or more than 1 standard deviation per the practice in the art. Alternatively, “about” or “comprising essentially of” can mean a range of up to 20%. Furthermore, particularly with respect to biological systems or processes, the terms can mean up to an order of magnitude or up to 5-fold of a value. When particular values or compositions are provided in the application and claims, unless otherwise stated, the meaning of “about” or “comprising essentially of” should be assumed to be within an acceptable error range for that particular value or composition.

[0090] As used herein, the term “catalytic domain” in reference to a deubiquitinase refers to an amino acid sequence, or a variant thereof, of a deubiquitinase that is capable of mediating deubiquitination of a target protein. The catalytic domain may comprise a naturally occurring amino acid sequence of a deubiquitinase or it may comprise a variant amino acid sequence of a naturally occurring deubiquitinase. The catalytic domain may comprise the minimum amino acid sequence of a deubiquitinase to mediate deubiquitination of a target protein. The catalytic domain may comprise more than the minimum amino acid sequence of a deubiquitinase to mediate deubiquitination of a target protein.

[0091] The terms “polynucleotide” and “nucleic acid sequence” are used interchangeably herein and refer to a polymer of DNA or RNA. The polynucleotide sequence can be single-stranded or double-stranded; contain natural, non-natural, or altered nucleotides; and contain a natural, non-natural, or altered internucleotide linkage, such as a phosphoroamidate linkage or a phosphorothioate linkage, instead of the phosphodiester found between the nucleotides of an unmodified polynucleotide sequence. Polynucleotide sequences include, but are not limited to, all polynucleotide sequences which are obtained by any means available in the art, including, without limitation, recombinant means, e.g., the cloning of polynucleotide sequences from a recombinant library or a cell genome, using ordinary cloning technology and polymerase chain reaction, and the like, and by synthetic means.

[0092] The terms “amino acid sequence” and “polypeptide” are used interchangeably herein and refer to a polymer of amino acids connected by one or more peptide bonds.

[0093] The term “functional variant” as used herein in reference to a protein or polypeptide refers to a protein that comprises at least one amino acid modification (e.g., a substitution, deletion, addition) compared to the amino acid sequence of a reference protein, that retains at least one particular function. In some embodiments, the reference protein is a wild type protein. For example, a functional variant of an IL-2 protein can refer to an IL-2 protein comprising an amino acid substitution as compared to a wild type IL-2 protein that retains the ability to bind the intermediate affinity IL-2 receptor but abrogates the ability of the protein to bind the high affinity IL-2 receptor. Not all functions of the reference wild type protein need be retained by the functional variant of the protein. In some instances, one or more functions are selectively reduced or eliminated.

[0094] The term “functional fragment” as used herein in reference to a protein or polypeptide refers to a fragment of a reference protein that retains at least one particular function. For example, a functional fragment of an anti-HER2 antibody can refer to a fragment of the anti-HER2 antibody that retains the ability to specifically bind the HER2 antigen. Not all functions of the reference protein need be retained by a functional fragment of the protein. In some instances, one or more functions are selectively reduced or eliminated.

[0095] As used herein, the term “modification,” with reference to a polynucleotide sequence, refers to a polynucleotide sequence that comprises at least one substitution, alteration, inversion, addition, or deletion of nucleotide compared to a reference polynucleotide sequence. Modifications can include non-naturally nucleotides. As used herein, the term “modification,” with reference to an amino acid sequence refers to an amino acid sequence that comprises at least one substitution, alteration, inversion, addition, or deletion of an amino acid residue compared to a reference amino acid sequence. Modifications can include the inclusion of non-naturally occurring amino acid residues.

[0096] As used herein, the term “derived from” with reference to an amino acid sequence refers to an amino acid sequence that has at least 80% sequence identity to a reference naturally occurring amino acid sequence. For example, a catalytic domain derived from a naturally occurring deubiquitinase means that the catalytic domain has an amino acid sequence with at least 80% sequence identity to the sequence of the deubiquitinase catalytic domain from which it is derived. The term “derived from” as used herein does not denote any specific process or method for obtaining the amino acid sequence. For example, the amino acid sequence can be chemically or recombinantly synthesized.

[0097] The term “fusion protein” and grammatical equivalents as used herein refers to a protein that comprises an amino acid sequence derived from at least two separate proteins. The amino acid sequence of the at least two separate proteins can be directly connected through a peptide bond; or can be operably connected through an amino acid linker. Therefore, the term fusion protein encompasses embodiments, wherein the amino acid sequence of e.g., Protein A is directly connected to the amino acid sequence of Protein B through a peptide bond (Protein A-Protein B), and embodiments, wherein the amino acid sequence of e.g., Protein A is operably connected to the amino acid sequence of Protein B through an amino acid linker (Protein A-linker-Protein B).

[0098] The term “fuse” and grammatical equivalents thereof as used herein refers to the operable connection of an amino acid sequence derived from one protein to the amino acid sequence derived from different protein. The term fuse encompasses both a direct connection of the two amino acid sequences through a peptide bond, and the indirect connection through an amino acid linker.

[0099] An “isolated antibody” refers to an antibody that is substantially free of other antibodies having different antigenic specificities (e.g., an isolated antibody that binds specifically to HER2 is substantially free of antibodies that bind specifically to antigens other than HER2). An isolated antibody that binds specifically to HER2 may, however, cross-react with other antigens, such as HER2 molecules from different species. Moreover, an isolated antibody may be substantially free of other cellular material and/or chemicals. By comparison, an “isolated” nucleic acid refers to a nucleic acid composition of matter that is markedly different, i.e., has a distinctive chemical identity, nature and utility, from nucleic acids as they exist in nature. For example, an isolated DNA, unlike native DNA, is a freestanding portion of a native DNA and not an integral part of a larger structural complex, the chromosome, found in nature. Further, an isolated DNA, unlike native DNA, can be used as a PCR primer or a hybridization probe for, among other things, measuring gene expression and detecting biomarker genes or mutations for diagnosing disease or predicting the efficacy of a therapeutic. An isolated nucleic acid may also be purified so as to be substantially free of other cellular components or other contaminants, e.g., other cellular nucleic acids or proteins, using standard techniques well known in the art.

[0100] As used herein, the term “antibody” or “antibodies” are used in the broadest sense and encompasses various antibody structures, including but not limited to monoclonal antibodies, polyclonal antibodies, multispecific antibodies (e.g., bispecific antibodies), and antibody fragments so long as they exhibit the desired antigen-binding activity (i.e. antigen binding fragments as defined herein). The term antibody thus includes, for example, include full-length antibodies, antigen-binding fragments of full-length antibodies, molecules comprising antibody CDRs, VH regions, and/or VL regions; and antibody-like scaffolds (e.g., fibronectins). Examples of antibodies include, without limitation, monoclonal antibodies, recombinantly produced antibodies, monospecific antibodies, multispecific antibodies (including bispecific antibodies), human antibodies, humanized antibodies, chimeric antibodies, immunoglobulins, synthetic antibodies, tetrameric antibodies comprising two heavy chain and two light chain molecules, an antibody light chain monomer, an antibody heavy chain monomer, an antibody light chain dimer, an antibody heavy chain dimer, an antibody light chain-antibody heavy chain pair, intrabodies, heteroconjugate antibodies, antibody-drug conjugates, single domain antibodies (e.g., VHH, (VHH)₂), monovalent antibodies, single chain antibodies, single-chain Fvs (scFv; (scFv)₂), camelized antibodies, affybodies, Fab fragments (e.g., Fab, single chain Fab (scFab), F(ab′)₂ fragments, disulfide-linked Fvs (sdFv), anti-idiotypic (anti-Id) antibodies (including, e.g., anti-anti-Id antibodies), diabodies, tribodies, and antibody-like scaffolds (e.g., fibronectins), Fc fusions (e.g., Fab-Fc, scFv-Fc, VHH-Fc, (scFv)₂-Fc, (VHH)₂—Fc, and antigen-binding fragments of any of the above, and conjugates or fusion proteins comprising any of the above. In certain embodiments, antibodies described herein refer to polyclonal antibody populations. In certain embodiments, antibodies described herein refer to monoclonal antibody populations. Antibodies can be of any type (e.g., IgG, IgE, IgM, IgD, IgA or IgY), any class (e.g., IgG₁, IgG₂, IgG₃, IgG₄, IgA₁ or IgA₂), or any subclass (e.g., IgG₂ₐ or IgG_{2b}) of immunoglobulin (Ig) molecule. In certain embodiments, antibodies described herein are IgG antibodies, or a class (e.g., human IgG₁ or IgG₄) or subclass thereof. In a specific embodiment, the antibody is a humanized monoclonal antibody. In another specific embodiment, the antibody is a human monoclonal antibody.

[0101] The term “full-length antibody,” as used herein refers to an antibody having a structure substantially similar to a native antibody structure comprising two heavy chains and two light chains interconnected by disulfide bonds. In some embodiments, the two heavy chains comprise a substantially identical amino acid sequence; and the two light chains comprise a substantially identical amino acid sequence. Antibody chains may be substantially identical but not entirely identical if they differ due to post-translational modifications, such as C-terminal cleavage of lysine residues, alternative glycosylation patterns, etc.

[0102] The terms “antigen binding fragment” and “antigen binding domain” are used interchangeably herein and refer to one or more polypeptides, other than a full-length antibody, that is capable of specifically binding to antigen and comprises a portion of a full-length antibody (e.g., a VH, a VL). Exemplary antigen binding fragments include, but are not limited to, single domain antibodies (e.g., VHH, (VHH)₂), single chain antibodies, single-chain Fvs (scFv; (scFv)₂), camelized antibodies, affybodies, Fab fragments (e.g., Fab, single chain Fab (scFab), F(ab′)₂ fragments, and disulfide-linked Fvs (sdFv). The antigen binding domain can be part of a larger protein, e.g., a full-length antibody.

[0103] The term “(scFv)₂” as used herein refers to an antibody that comprises a first and a second scFv operably connected (e.g., via a linker). The first and second scFv can specifically bind the same or different antigens. In some embodiments, the first and second scFv are operably connected by an amino via an amino acid linker.

[0104] The term “(VHH)₂” as used herein refers to an antibody that comprises a first and a second VHH operably connected (e.g., via a linker). The first and the second VHH can specifically bind the same or different antigens. In some embodiments, the first and second VHH are operably connected by an amino via an amino acid linker.

[0105] The term “Fab-Fc” as used herein refers to an antibody that comprises a Fab operably linked to an Fc domain or a subunit of an Fc domain. A full-length antibody described herein comprises two Fabs, one Fab operably connected to one Fc domain and the other Fab operably connected to a second Fc domain.

[0106] The term “scFv-Fc” as used herein refers to an antibody that comprises a scFv operably linked to an Fc domain or subunit of an Fc domain.

[0107] The term “VHH-Fc” as used herein refers to an antibody that comprises a VHH operably linked to an Fc domain or a subunit of an Fc domain.

[0108] The term “(scFv)₂-Fc” as used herein refers to a (scFv)₂ operably linked to an Fc domain or a subunit of an Fc domain.

[0109] The term “(VHH)₂—Fc” as used herein refers to (VHH)₂ operably linked to an Fc domain or a subunit of an Fc domain.

[0110] “Antibody-like scaffolds” are known in the art, for example, fibronectin and designed ankyrin repeat proteins (DARPins) have been used as alternative scaffolds for antigen-binding domains, see, e.g., Gebauer and Skerra, Engineered protein scaffolds as next-generation antibody therapeutics. Curr Opin Chem Biol 13:245-255 (2009) and Stumpp et al., Darpins: A new generation of protein therapeutics. Drug Discovery Today 13: 695-701 (2008). Exemplary antibody-like scaffold proteins include, but are not limited to, lipocalins (Anticalin), Protein A-derived molecules such as Z-domains of Protein A (Affibody), an A-domain (Avimer/Maxibody), a serum transferrin (trans-body); a designed ankyrin repeat protein (DARPin), VNAR fragments, a fibronectin (AdNectin), a C-type lectin domain (Tetranectin); a variable domain of a new antigen receptor beta-lactamase (VNAR fragments), a human gamma-crystallin or ubiquitin (Affilin molecules); a kunitz type domain of human protease inhibitors, microbodies such as the proteins from the knottin family, peptide aptamers and fibronectin (adnectin).

[0111] As used herein, the term “CDR” or “complementarity determining region” means the noncontiguous antigen combining sites found within the variable region of both heavy and light chain polypeptides. These particular regions have been described by Kabat et al., J. Biol. Chem. 252, 6609-6616 (1977) and Kabat et al., Sequences of protein of immunological interest. (1991), all of which are herein incorporated by reference in their entireties. Unless otherwise specified, the term “CDR” is a CDR as defined by Kabat et al., J. Biol. Chem. 252, 6609-6616 (1977) and Kabat et al., Sequences of protein of immunological interest. (1991).

[0112] As used herein, the term “framework (FR) amino acid residues” refers to those amino acids in the framework region of an antibody variable region. The term “framework region” or “FR region” as used herein, includes the amino acid residues that are part of the variable region, but are not part of the CDRs (e.g., using the Kabat definition of CDRs).

[0113] As used herein, the term “heavy chain” when used in reference to an antibody can refer to any distinct type, e.g., alpha (α), delta (δ), epsilon (ε), gamma (γ), and mu (μ), based on the amino acid sequence of the constant domain, which give rise to IgA, IgD, IgE, IgG, and IgM classes of antibodies, respectively, including subclasses of IgG, e.g., IgG₁, IgG₂, IgG₃, and IgG₄.

[0114] As used herein, the term “light chain” when used in reference to an antibody can refer to any distinct type, e.g., kappa (κ) or lambda (λ) based on the amino acid sequence of the constant domains. Light chain amino acid sequences are well known in the art. In specific embodiments, the light chain is a human light chain.

[0115] As used herein, the terms “variable region” refers to a portion of an antibody, generally, a portion of a light or heavy chain, typically about the amino-terminal 110 to 120 amino acids or 110 to 125 amino acids in the mature heavy chain and about 90 to 115 amino acids in the mature light chain, which differ extensively in sequence among antibodies and are used in the binding and specificity of a particular antibody for its particular antigen. The variability in sequence is concentrated in those regions called complementarity determining regions (CDRs) while the more highly conserved regions in the variable domain are called framework regions (FR). Without wishing to be bound by any particular mechanism or theory, it is believed that the CDRs of the light and heavy chains are primarily responsible for the interaction and specificity of the antibody with antigen. In certain embodiments, the variable region is a human variable region. In certain embodiments, the variable region comprises rodent or murine CDRs and human framework regions (FRs). In particular embodiments, the variable region is a primate (e.g., non-human primate) variable region. In certain embodiments, the variable region comprises rodent or murine CDRs and primate (e.g., non-human primate) framework regions (FRs).

[0116] The terms “VL” and “VL domain” are used interchangeably to refer to the light chain variable region of an antibody.

[0117] The terms “VH” and “VH domain” are used interchangeably to refer to the heavy chain variable region of an antibody.

[0118] As used herein, the terms “constant region” and “constant domain” are interchangeable and are common in the art. The constant region is an antibody portion, e.g., a carboxyl terminal portion of a light and/or heavy chain which is not directly involved in binding of an antibody to antigen but which can exhibit various effector functions, such as interaction with an Fc receptor (e.g., Fc gamma receptor). The constant region of an immunoglobulin (Ig) molecule generally has a more conserved amino acid sequence relative to an immunoglobulin (Ig) variable domain.

[0119] The term “Fc region” as used herein refers to the C-terminal region of an immunoglobulin (Ig) heavy chain that comprises from N- to C-terminus at least a CH2 domain operably connected to a CH3 domain. In some embodiments, the Fc region comprises an immunoglobulin (Ig) hinge region operably connected to the N-terminus of the CH2 domain. Examples of proteins with engineered Fc regions can be found in Saunders 2019 (K. O. Saunders, “Conceptual Approaches to Modulating Antibody Effector Functions and Circulation Half-Life,” 2019, Frontiers in Immunology, V. 10, Art. 1296, pp. 1-20, which is incorporated by reference herein).

[0120] As used herein, the term “EU numbering system” refers to the EU numbering convention for the constant regions of an antibody, as described in Edelman, G. M. et al., Proc. Natl. Acad. USA, 63, 78-85 (1969) and Kabat et al, Sequences of Proteins of Immunological Interest, U.S. Dept. Health and Human Services, 5th edition, 1991, each of which is herein incorporated by reference in its entirety.

[0121] As used herein, the term “Kabat numbering system” refers to the Kabat numbering convention for variable regions of an antibody, see e.g., Kabat et al, Sequences of Proteins of Immunological Interest, U.S. Dept. Health and Human Services, 5th edition, 1991. Unless otherwise noted, numbering of the variable regions of an antibody are denoted according to the Kabat numbering system.

[0122] As used herein, the terms “specifically binds,” refers to molecules that bind to an antigen (e.g., epitope or immune complex) as such binding is understood by one skilled in the art. For example, a molecule that specifically binds to an antigen can bind to other peptides or polypeptides, generally with lower affinity as determined by, e.g., immunoassays, BIAcore©, KinExA 3000 instrument (Sapidyne Instruments, Boise, ID), or other assays known in the art. In a specific embodiment, molecules that specifically bind to an antigen bind to the antigen with a K_{A} that is at least 2 logs (e.g., factors of 10), 2.5 logs, 3 logs, 4 logs or greater than the K_{A} when the molecules bind non-specifically to another antigen. The skilled worker will appreciate that an antibody, as described herein, can specifically bind to more than one antigen (e.g., via different regions of the antibody molecule). The term specifically binds includes molecules that are cross reactive with the same antigen of a different species. For example, an antigen binding domain that specifically binds human CD20 may be cross reactive with CD20 of another species (e.g., cynomolgus monkey, or murine), and still be considered herein to specifically bind human CD20.

[0123] “Affinity” refers to the strength of the sum total of non-covalent interactions between a single binding site of a molecule (e.g., a receptor) and its binding partner (e.g., a ligand). Unless indicated otherwise, as used herein, “binding affinity” refers to intrinsic binding affinity, which reflects a 1:1 interaction between members of a binding pair (e.g., an antigen binding moiety and an antigen, or a receptor and its ligand). The affinity of a molecule X for its partner Y can generally be represented by the dissociation constant (KD), which is the ratio of dissociation and association rate constants (koff and kon, respectively). Thus, equivalent affinities may comprise different rate constants, as long as the ratio of the rate constants remains the same. Affinity can be measured by well-established methods known in the art, including those described herein. A particular method for measuring affinity is Surface Plasmon Resonance (SPR).

[0124] The determination of “percent identity” between two sequences (e.g., amino acid sequences or nucleic acid sequences) can be accomplished using a mathematical algorithm. Identity measures the percent of identical matches between the smaller of two or more sequences with gap alignments (if any) addressed by a particular mathematical model or computer program (i.e., “algorithms”). A specific, non-limiting example of a mathematical algorithm utilized for the comparison of two sequences is the algorithm of Karlin S & Altschul S F (1990) PNAS 87: 2264-2268, modified as in Karlin S & Altschul S F (1993) PNAS 90: 5873-5877, each of which is herein incorporated by reference in its entirety. Such an algorithm is incorporated into the BLASTN, BLASTP, BLASTX programs of Altschul S F et al., (1990) J Mol Biol 215: 403, which is herein incorporated by reference in its entirety. BLAST nucleotide searches can be performed with the NBLAST nucleotide program parameters set, e.g., for score=100, wordlength=12 to obtain nucleotide sequences homologous to a nucleic acid molecule described herein. BLAST protein searches can be performed with the BLASTP program parameters set, e.g., default settings; to obtain amino acid sequences homologous to a protein molecule described herein. To obtain gapped alignments for comparison purposes, Gapped BLAST can be utilized as described in Altschul S F et al., (1997) Nuc Acids Res 25: 3389-3402, which is herein incorporated by reference in its entirety. Alternatively, PSI BLAST can be used to perform an iterated search which detects distant relationships between molecules (Id.). When utilizing BLAST, Gapped BLAST, and PSI Blast programs, the default parameters of the respective programs (e.g., of BLASTP and BLASTN) can be used (see, e.g., National Center for Biotechnology Information (NCBI) on the worldwide web, ncbi.nlm.nih.gov). Another specific, non-limiting example of a mathematical algorithm utilized for the comparison of sequences is the algorithm of Myers and Miller, 1988, CABIOS 4:11-17, which is herein incorporated by reference in its entirety. Such an algorithm is incorporated in the ALIGN program (version 2.0) which is part of the GCG sequence alignment software package. When utilizing the ALIGN program for comparing amino acid sequences, a PAM120 weight residue table, a gap length penalty of 12, and a gap penalty of 4 can be used. The percent identity between two sequences can be determined using techniques similar to those described above, with or without allowing gaps. In calculating percent identity, typically only exact matches are counted. As described above, the percent identity is based on the amino acid matches between the smaller of two proteins. Therefore, for example, using NCBI Basic Local Alignment Tool—BLASTP program on the default settings (Search Parameters: word size 3, expect value 0.05, hitlist 100, Gapcosts 11,1; Matrix BLOSUM62, Filter string: F; Genetic Code: 1; Window Size: 40; Threshold: 11; Composition Based Stats: 2; Karlin-Altschul Statistics: Lambda: 0.31293; 0.267; K: 0.132922; 0.041; H: 0.401809; 0.14; and Relative Statistics: Effective search space: 288906); the percent identity between SEQ ID NO: 80 and SEQ ID NO: 270 is 100% identity.

[0125] As used herein, the term “operably connected” refers to a linkage of polynucleotide sequence elements or amino acid sequence elements in a functional relationship. For example, a polynucleotide sequence is operably connected when it is placed into a functional relationship with another polynucleotide sequence. In some embodiments, a transcription regulatory polynucleotide sequence e.g., a promoter, enhancer, or other expression control element is operably-linked to a polynucleotide sequence that encodes a protein if it affects the transcription of the polynucleotide sequence that encodes the protein.

[0126] The terms “subject” and “patient” are used interchangeably herein and include any human or nonhuman animal. The term “nonhuman animal” includes, but is not limited to, vertebrates such as nonhuman primates, sheep, dogs, and rodents such as mice, rats and guinea pigs. In some embodiments, the subject is a human.

[0127] As used herein, the term “administering” refers to the physical introduction of a therapeutic agent (or a precursor of the therapeutic agent that is metabolized or altered within the body of the subject to produce the therapeutic agent in vivo) to a subject, using any of the various methods and delivery systems known to those skilled in the art. Exemplary routes of include intravenous, intramuscular, subcutaneous, intraperitoneal, spinal or other parenteral routes of administration, for example by injection or infusion. The term “parenteral administration” as used herein means modes of administration other than enteral and topical administration, usually by injection, and includes, without limitation, intravenous, intramuscular, intraarterial, intrathecal, intralymphatic, intralesional, intracapsular, intraorbital, intracardiac, intradermal, intraperitoneal, transtracheal, subcutaneous, subcuticular, intraarticular, subcapsular, subarachnoid, intraspinal, epidural and intrasternal injection and infusion, as well as in vivo electroporation. A therapeutic agent may be administered via a non-parenteral route, or orally. Other non-parenteral routes include a topical, epidermal or mucosal route of administration, for example, intranasally, vaginally, rectally, sublingually or topically. Administering can also be performed, for example, once, a plurality of times, and/or over one or more extended periods.

[0128] A “therapeutically effective amount” or “therapeutically effective dose” of a drug or therapeutic agent is any amount of the drug that, when used alone or in combination with another therapeutic agent, protects a subject against the onset of a disease or promotes disease regression evidenced by a decrease in severity of disease symptoms, an increase in frequency and duration of disease symptom-free periods, or a prevention of impairment or disability due to the disease affliction. The ability of a therapeutic agent to promote disease regression can be evaluated using a variety of methods known to the skilled practitioner, such as in human subjects during clinical trials, in animal model systems predictive of efficacy in humans, or by assaying the activity of the agent in in vitro assays.

[0129] The terms “disease,” “disorder,” and “syndrome” are used interchangeably herein.

[0130] As used herein, the terms “treat,” treating,” “treatment,” and the like refer to reducing or ameliorating a disease and/or symptom(s) associated therewith or obtaining a desired pharmacologic and/or physiologic effect. It will be appreciated that, although not precluded, treating a disease does not require that the disease or symptoms associated therewith be completely eliminated. In some embodiments, the effect is therapeutic, i.e., without limitation, the effect partially or completely reduces, diminishes, abrogates, abates, alleviates, decreases the intensity of, or cures a disease and/or adverse symptom attributable to the disease. In some embodiments, the effect is preventative, i.e., the effect protects or prevents an occurrence or reoccurrence of a disease. To this end, the presently disclosed methods comprise administering a therapeutically effective amount of a compositions as described herein.

### 5.3 Fusion Proteins

[0131] In certain aspects, provided herein are fusion proteins that comprise an effector domain comprising a catalytic domain of a deubiquitinase, or a functional fragment or functional variant thereof; and a targeting domain comprising a moiety that specifically binds a target cytosolic protein.

### 5.3.1 Effector Domain

[0132] In some embodiments, the effector domain comprises a catalytic domain of a deubiquitinase, or a functional fragment or functional variant thereof. In some embodiments, the deubiquitinase is human. In some embodiments, the catalytic domain is derived from a naturally occurring deubiquitinase (e.g., a naturally occurring human deubiquitinase).

[0133] In some embodiments, the amino acid sequence of the effector domain comprises the amino acid sequence of a full length deubiquitinase. In some embodiments, the amino acid sequence of the effector domain comprises the amino acid sequence of a catalytic domain of a deubiquitinase and an additional amino acid sequence at the N-terminal, C-terminal, or N-terminal and C-terminal end of the catalytic domain.

[0134] In some embodiments, the catalytic domain comprises a naturally occurring amino acid sequence of a deubiquitinase. In some embodiments, the catalytic domain comprises a variant of a naturally occurring deubiquitinase. In some embodiments, the amino acid sequence of the catalytic domain of the fusion protein is at least 80%, 81%, 82%, 83%, 84%, 85%, 86%, 87%, 88%, 89%, 90%, 91%, 92%, 93%, 94%, 95%, 96%, 97%, 98%, 99%, or 100% identical to the amino acid sequence of the catalytic domain of a naturally occurring deubiquitinase. In some embodiments, the amino acid sequence of the catalytic domain of the fusion protein comprises 1, 2, 3, 4, 5, 6, 7, 8, 9, 10, 15, or 20 amino acid modifications compared to the amino acid sequence of the catalytic domain of a naturally occurring deubiquitinase.

[0135] In some embodiments, the catalytic domain comprises the minimum amino acid sequence of a naturally occurring deubiquitinase sufficient to mediate deubiquitination of a target protein. In some embodiments, the catalytic domain comprises more than the minimum amino acid sequence of a naturally occurring deubiquitinase sufficient to mediate deubiquitination of a target protein.

[0136] In some embodiments, the deubiquitinase is a cysteine protease or a metalloprotease. In some embodiments, the deubiquitinase is a cysteine protease. In some embodiments, the deubiquitinase is a metalloprotease. In some embodiments, the deubiquitinase is a ubiquitin-specific protease (USP), a ubiquitin C-terminal hydrolase (UCH), a Machado-Josephin domain protease (MJD), an ovarian tumor protease (OTU), a MINDY protease, or a ZUFSP protease.

[0137] Exemplary deubiquitinases include, but are not limited to, USP1, USP2, USP3, USP4, USP5, USP6, USP7, USP8, USP9X, USP9Y, USP10, USP11, USP12, USP13, USP14, USP15, USP16, USP17, USP17L2, USP17L3, USP17L4, USP17L5, USP17L7, USP17L8, USP18, USP19, USP20, USP21, USP22, USP23, USP24, USP25, USP26, USP27X, USP28, USP29, USP30, USP31, USP32, USP33, USP34, USP35, USP36, USP37, USP38, USP39, USP40, USP41, USP42, USP43, USP44, USP45, USP46, BAP1, UCHL1, UCHL3, UCHL5, ATXN3, ATXN3L, OTUB1, OTUB2, MINDY1, MINDY2, MINDY3, MINDY4, and ZUP1. Exemplary deubiquitinases for use in the present disclosure are also disclosed in Komander, D. et al. Breaking the chains: structure and function of the deubiquitinases. Nat Rev Mol Cell Biol 10, 550-563 (2009), the entire contents of which is incorporated by reference herein.

[0138] In some embodiments, the deubiquitinase is selected from the group consisting of USP1, USP2, USP3, USP4, USP5, USP6, USP7, USP8, USP9X, USP9Y, USP10, USP11, USP12, USP13, USP14, USP15, USP16, USP17, USP17L2, USP17L3, USP17L4, USP17L5, USP17L7, USP17L8, USP18, USP19, USP20, USP21, USP22, USP23, USP24, USP25, USP26, USP27X, USP28, USP29, USP30, USP31, USP32, USP33, USP34, USP35, USP36, USP37, USP38, USP39, USP40, USP41, USP42, USP43, USP44, USP45, and USP46.

[0139] In some embodiments, the deubiquitinase is BAP1, UCHL1, UCHL3, or UCHL5. In some embodiments, the deubiquitinase is ATXN3 or ATXN3L. In some embodiments, the deubiquitinase is OTUB1 or OTUB2. In some embodiments, the deubiquitinase is MINDY1, MINDY2, MINDY3, or MINDY4. In some embodiments, the deubiquitinase is ZUP1. In some embodiments, the deubiquitinase is a Jab1/Mov34/Mpr1 Pad1 N-terminal+ (MPN+) (JAMM) domain protease.

[0140] In some embodiments, the deubiquitinase is a deubiquitinase described in Table 1. In some embodiments, the amino acid sequence of the deubiquitinase comprises an amino acid sequence at least 80%, 81%, 82%, 83%, 84%, 85%, 86%, 87%, 88%, 89%, 90%, 91%, 92%, 93%, 94%, 95%, 96%, 97%, 98%, 99%, or 100% identical to the amino acid sequence of a deubiquitinase in Table 1. In some embodiments, the amino acid sequence of the effector domain comprises an amino acid sequence at least 80%, 81%, 82%, 83%, 84%, 85%, 86%, 87%, 88%, 89%, 90%, 91%, 92%, 93%, 94%, 95%, 96%, 97%, 98%, 99%, or 100% identical to a catalytic domain of a deubiquitinase in Table 1. In some embodiments, the effector domain comprises a functional fragment of a deubiquitinase in Table 1. In some embodiments, the effector domain deubiquitinase comprises a functional variant of deubiquitinase in Table 1. In some embodiments, the catalytic domain comprises a functional fragment of a catalytic domain of a deubiquitinase in Table 1. In some embodiments, the catalytic domain comprises a functional variant of a catalytic domain of a deubiquitinase in Table 1.

[0141] In some embodiments, the deubiquitinase comprises an amino acid sequence at least 80%, 81%, 82%, 83%, 84%, 85%, 86%, 87%, 88%, 89%, 90%, 91%, 92%, 93%, 94%, 95%, 96%, 97%, 98%, 99%, or 100% identical any one of SEQ ID NOS: 1-112. In some embodiments, the deubiquitinase consists of an amino acid sequence at least 80%, 81%, 82%, 83%, 84%, 85%, 86%, 87%, 88%, 89%, 90%, 91%, 92%, 93%, 94%, 95%, 96%, 97%, 98%, 99%, or 100% identical any one of SEQ ID NOS: 1-112.

[0142] In some embodiments, the deubiquitinase comprises an amino acid sequence at least 80%, 81%, 82%, 83%, 84%, 85%, 86%, 87%, 88%, 89%, 90%, 91%, 92%, 93%, 94%, 95%, 96%, 97%, 98%, 99%, or 100% identical to SEQ ID NO: 1. In some embodiments, the deubiquitinase comprises an amino acid sequence at least 80%, 81%, 82%, 83%, 84%, 85%, 86%, 87%, 88%, 89%, 90%, 91%, 92%, 93%, 94%, 95%, 96%, 97%, 98%, 99%, or 100% identical to SEQ ID NO: 2. In some embodiments, the deubiquitinase comprises an amino acid sequence at least 80%, 81%, 82%, 83%, 84%, 85%, 86%, 87%, 88%, 89%, 90%, 91%, 92%, 93%, 94%, 95%, 96%, 97%, 98%, 99%, or 100% identical to SEQ ID NO: 3. In some embodiments, the deubiquitinase comprises an amino acid sequence at least 80%, 81%, 82%, 83%, 84%, 85%, 86%, 87%, 88%, 89%, 90%, 91%, 92%, 93%, 94%, 95%, 96%, 97%, 98%, 99%, or 100% identical to SEQ ID NO: 4. In some embodiments, the deubiquitinase comprises an amino acid sequence at least 80%, 81%, 82%, 83%, 84%, 85%, 86%, 87%, 88%, 89%, 90%, 91%, 92%, 93%, 94%, 95%, 96%, 97%, 98%, 99%, or 100% identical to SEQ ID NO: 5. In some embodiments, the deubiquitinase comprises an amino acid sequence at least 80%, 81%, 82%, 83%, 84%, 85%, 86%, 87%, 88%, 89%, 90%, 91%, 92%, 93%, 94%, 95%, 96%, 97%, 98%, 99%, or 100% identical to SEQ ID NO: 6. In some embodiments, the deubiquitinase comprises an amino acid sequence at least 80%, 81%, 82%, 83%, 84%, 85%, 86%, 87%, 88%, 89%, 90%, 91%, 92%, 93%, 94%, 95%, 96%, 97%, 98%, 99%, or 100% identical to SEQ ID NO: 7. In some embodiments, the deubiquitinase comprises an amino acid sequence at least 80%, 81%, 82%, 83%, 84%, 85%, 86%, 87%, 88%, 89%, 90%, 91%, 92%, 93%, 94%, 95%, 96%, 97%, 98%, 99%, or 100% identical to SEQ ID NO: 8. In some embodiments, the deubiquitinase comprises an amino acid sequence at least 80%, 81%, 82%, 83%, 84%, 85%, 86%, 87%, 88%, 89%, 90%, 91%, 92%, 93%, 94%, 95%, 96%, 97%, 98%, 99%, or 100% identical to SEQ ID NO: 9. In some embodiments, the deubiquitinase comprises an amino acid sequence at least 80%, 81%, 82%, 83%, 84%, 85%, 86%, 87%, 88%, 89%, 90%, 91%, 92%, 93%, 94%, 95%, 96%, 97%, 98%, 99%, or 100% identical to SEQ ID NO: 10. In some embodiments, the deubiquitinase comprises an amino acid sequence at least 80%, 81%, 82%, 83%, 84%, 85%, 86%, 87%, 88%, 89%, 90%, 91%, 92%, 93%, 94%, 95%, 96%, 97%, 98%, 99%, or 100% identical to SEQ ID NO: 11. In some embodiments, the deubiquitinase comprises an amino acid sequence at least 80%, 81%, 82%, 83%, 84%, 85%, 86%, 87%, 88%, 89%, 90%, 91%, 92%, 93%, 94%, 95%, 96%, 97%, 98%, 99%, or 100% identical to SEQ ID NO: 12. In some embodiments, the deubiquitinase comprises an amino acid sequence at least 80%, 81%, 82%, 83%, 84%, 85%, 86%, 87%, 88%, 89%, 90%, 91%, 92%, 93%, 94%, 95%, 96%, 97%, 98%, 99%, or 100% identical to SEQ ID NO: 13. In some embodiments, the deubiquitinase comprises an amino acid sequence at least 80%, 81%, 82%, 83%, 84%, 85%, 86%, 87%, 88%, 89%, 90%, 91%, 92%, 93%, 94%, 95%, 96%, 97%, 98%, 99%, or 100% identical to SEQ ID NO: 14. In some embodiments, the deubiquitinase comprises an amino acid sequence at least 80%, 81%, 82%, 83%, 84%, 85%, 86%, 87%, 88%, 89%, 90%, 91%, 92%, 93%, 94%, 95%, 96%, 97%, 98%, 99%, or 100% identical to SEQ ID NO: 15. In some embodiments, the deubiquitinase comprises an amino acid sequence at least 80%, 81%, 82%, 83%, 84%, 85%, 86%, 87%, 88%, 89%, 90%, 91%, 92%, 93%, 94%, 95%, 96%, 97%, 98%, 99%, or 100% identical to SEQ ID NO: 16. In some embodiments, the deubiquitinase comprises an amino acid sequence at least 80%, 81%, 82%, 83%, 84%, 85%, 86%, 87%, 88%, 89%, 90%, 91%, 92%, 93%, 94%, 95%, 96%, 97%, 98%, 99%, or 100% identical to SEQ ID NO: 17. In some embodiments, the deubiquitinase comprises an amino acid sequence at least 80%, 81%, 82%, 83%, 84%, 85%, 86%, 87%, 88%, 89%, 90%, 91%, 92%, 93%, 94%, 95%, 96%, 97%, 98%, 99%, or 100% identical to SEQ ID NO: 18. In some embodiments, the deubiquitinase comprises an amino acid sequence at least 80%, 81%, 82%, 83%, 84%, 85%, 86%, 87%, 88%, 89%, 90%, 91%, 92%, 93%, 94%, 95%, 96%, 97%, 98%, 99%, or 100% identical to SEQ ID NO: 19. In some embodiments, the deubiquitinase comprises an amino acid sequence at least 80%, 81%, 82%, 83%, 84%, 85%, 86%, 87%, 88%, 89%, 90%, 91%, 92%, 93%, 94%, 95%, 96%, 97%, 98%, 99%, or 100% identical to SEQ ID NO: 20. In some embodiments, the deubiquitinase comprises an amino acid sequence at least 80%, 81%, 82%, 83%, 84%, 85%, 86%, 87%, 88%, 89%, 90%, 91%, 92%, 93%, 94%, 95%, 96%, 97%, 98%, 99%, or 100% identical to SEQ ID NO: 21. In some embodiments, the deubiquitinase comprises an amino acid sequence at least 80%, 81%, 82%, 83%, 84%, 85%, 86%, 87%, 88%, 89%, 90%, 91%, 92%, 93%, 94%, 95%, 96%, 97%, 98%, 99%, or 100% identical to SEQ ID NO: 22. In some embodiments, the deubiquitinase comprises an amino acid sequence at least 80%, 81%, 82%, 83%, 84%, 85%, 86%, 87%, 88%, 89%, 90%, 91%, 92%, 93%, 94%, 95%, 96%, 97%, 98%, 99%, or 100% identical to SEQ ID NO: 23. In some embodiments, the deubiquitinase comprises an amino acid sequence at least 80%, 81%, 82%, 83%, 84%, 85%, 86%, 87%, 88%, 89%, 90%, 91%, 92%, 93%, 94%, 95%, 96%, 97%, 98%, 99%, or 100% identical to SEQ ID NO: 24. In some embodiments, the deubiquitinase comprises an amino acid sequence at least 80%, 81%, 82%, 83%, 84%, 85%, 86%, 87%, 88%, 89%, 90%, 91%, 92%, 93%, 94%, 95%, 96%, 97%, 98%, 99%, or 100% identical to SEQ ID NO: 25. In some embodiments, the deubiquitinase comprises an amino acid sequence at least 80%, 81%, 82%, 83%, 84%, 85%, 86%, 87%, 88%, 89%, 90%, 91%, 92%, 93%, 94%, 95%, 96%, 97%, 98%, 99%, or 100% identical to SEQ ID NO: 26. In some embodiments, the deubiquitinase comprises an amino acid sequence at least 80%, 81%, 82%, 83%, 84%, 85%, 86%, 87%, 88%, 89%, 90%, 91%, 92%, 93%, 94%, 95%, 96%, 97%, 98%, 99%, or 100% identical to SEQ ID NO: 27. In some embodiments, the deubiquitinase comprises an amino acid sequence at least 80%, 81%, 82%, 83%, 84%, 85%, 86%, 87%, 88%, 89%, 90%, 91%, 92%, 93%, 94%, 95%, 96%, 97%, 98%, 99%, or 100% identical to SEQ ID NO: 28. In some embodiments, the deubiquitinase comprises an amino acid sequence at least 80%, 81%, 82%, 83%, 84%, 85%, 86%, 87%, 88%, 89%, 90%, 91%, 92%, 93%, 94%, 95%, 96%, 97%, 98%, 99%, or 100% identical to SEQ ID NO: 29. In some embodiments, the deubiquitinase comprises an amino acid sequence at least 80%, 81%, 82%, 83%, 84%, 85%, 86%, 87%, 88%, 89%, 90%, 91%, 92%, 93%, 94%, 95%, 96%, 97%, 98%, 99%, or 100% identical to SEQ ID NO: 30. In some embodiments, the deubiquitinase comprises an amino acid sequence at least 80%, 81%, 82%, 83%, 84%, 85%, 86%, 87%, 88%, 89%, 90%, 91%, 92%, 93%, 94%, 95%, 96%, 97%, 98%, 99%, or 100% identical to SEQ ID NO: 31. In some embodiments, the deubiquitinase comprises an amino acid sequence at least 80%, 81%, 82%, 83%, 84%, 85%, 86%, 87%, 88%, 89%, 90%, 91%, 92%, 93%, 94%, 95%, 96%, 97%, 98%, 99%, or 100% identical to SEQ ID NO: 32. In some embodiments, the deubiquitinase comprises an amino acid sequence at least 80%, 81%, 82%, 83%, 84%, 85%, 86%, 87%, 88%, 89%, 90%, 91%, 92%, 93%, 94%, 95%, 96%, 97%, 98%, 99%, or 100% identical to SEQ ID NO: 33. In some embodiments, the deubiquitinase comprises an amino acid sequence at least 80%, 81%, 82%, 83%, 84%, 85%, 86%, 87%, 88%, 89%, 90%, 91%, 92%, 93%, 94%, 95%, 96%, 97%, 98%, 99%, or 100% identical to SEQ ID NO: 34. In some embodiments, the deubiquitinase comprises an amino acid sequence at least 80%, 81%, 82%, 83%, 84%, 85%, 86%, 87%, 88%, 89%, 90%, 91%, 92%, 93%, 94%, 95%, 96%, 97%, 98%, 99%, or 100% identical to SEQ ID NO: 35. In some embodiments, the deubiquitinase comprises an amino acid sequence at least 80%, 81%, 82%, 83%, 84%, 85%, 86%, 87%, 88%, 89%, 90%, 91%, 92%, 93%, 94%, 95%, 96%, 97%, 98%, 99%, or 100% identical to SEQ ID NO: 36. In some embodiments, the deubiquitinase comprises an amino acid sequence at least 80%, 81%, 82%, 83%, 84%, 85%, 86%, 87%, 88%, 89%, 90%, 91%, 92%, 93%, 94%, 95%, 96%, 97%, 98%, 99%, or 100% identical to SEQ ID NO: 37. In some embodiments, the deubiquitinase comprises an amino acid sequence at least 80%, 81%, 82%, 83%, 84%, 85%, 86%, 87%, 88%, 89%, 90%, 91%, 92%, 93%, 94%, 95%, 96%, 97%, 98%, 99%, or 100% identical to SEQ ID NO: 38. In some embodiments, the deubiquitinase comprises an amino acid sequence at least 80%, 81%, 82%, 83%, 84%, 85%, 86%, 87%, 88%, 89%, 90%, 91%, 92%, 93%, 94%, 95%, 96%, 97%, 98%, 99%, or 100% identical to SEQ ID NO: 39. In some embodiments, the deubiquitinase comprises an amino acid sequence at least 80%, 81%, 82%, 83%, 84%, 85%, 86%, 87%, 88%, 89%, 90%, 91%, 92%, 93%, 94%, 95%, 96%, 97%, 98%, 99%, or 100% identical to SEQ ID NO: 40. In some embodiments, the deubiquitinase comprises an amino acid sequence at least 80%, 81%, 82%, 83%, 84%, 85%, 86%, 87%, 88%, 89%, 90%, 91%, 92%, 93%, 94%, 95%, 96%, 97%, 98%, 99%, or 100% identical to SEQ ID NO: 41. In some embodiments, the deubiquitinase comprises an amino acid sequence at least 80%, 81%, 82%, 83%, 84%, 85%, 86%, 87%, 88%, 89%, 90%, 91%, 92%, 93%, 94%, 95%, 96%, 97%, 98%, 99%, or 100% identical to SEQ ID NO: 42. In some embodiments, the deubiquitinase comprises an amino acid sequence at least 80%, 81%, 82%, 83%, 84%, 85%, 86%, 87%, 88%, 89%, 90%, 91%, 92%, 93%, 94%, 95%, 96%, 97%, 98%, 99%, or 100% identical to SEQ ID NO: 43. In some embodiments, the deubiquitinase comprises an amino acid sequence at least 80%, 81%, 82%, 83%, 84%, 85%, 86%, 87%, 88%, 89%, 90%, 91%, 92%, 93%, 94%, 95%, 96%, 97%, 98%, 99%, or 100% identical to SEQ ID NO: 44. In some embodiments, the deubiquitinase comprises an amino acid sequence at least 80%, 81%, 82%, 83%, 84%, 85%, 86%, 87%, 88%, 89%, 90%, 91%, 92%, 93%, 94%, 95%, 96%, 97%, 98%, 99%, or 100% identical to SEQ ID NO: 45. In some embodiments, the deubiquitinase comprises an amino acid sequence at least 80%, 81%, 82%, 83%, 84%, 85%, 86%, 87%, 88%, 89%, 90%, 91%, 92%, 93%, 94%, 95%, 96%, 97%, 98%, 99%, or 100% identical to SEQ ID NO: 46. In some embodiments, the deubiquitinase comprises an amino acid sequence at least 80%, 81%, 82%, 83%, 84%, 85%, 86%, 87%, 88%, 89%, 90%, 91%, 92%, 93%, 94%, 95%, 96%, 97%, 98%, 99%, or 100% identical to SEQ ID NO: 47. In some embodiments, the deubiquitinase comprises an amino acid sequence at least 80%, 81%, 82%, 83%, 84%, 85%, 86%, 87%, 88%, 89%, 90%, 91%, 92%, 93%, 94%, 95%, 96%, 97%, 98%, 99%, or 100% identical to SEQ ID NO: 48. In some embodiments, the deubiquitinase comprises an amino acid sequence at least 80%, 81%, 82%, 83%, 84%, 85%, 86%, 87%, 88%, 89%, 90%, 91%, 92%, 93%, 94%, 95%, 96%, 97%, 98%, 99%, or 100% identical to SEQ ID NO: 49. In some embodiments, the deubiquitinase comprises an amino acid sequence at least 80%, 81%, 82%, 83%, 84%, 85%, 86%, 87%, 88%, 89%, 90%, 91%, 92%, 93%, 94%, 95%, 96%, 97%, 98%, 99%, or 100% identical to SEQ ID NO: 50. In some embodiments, the deubiquitinase comprises an amino acid sequence at least 80%, 81%, 82%, 83%, 84%, 85%, 86%, 87%, 88%, 89%, 90%, 91%, 92%, 93%, 94%, 95%, 96%, 97%, 98%, 99%, or 100% identical to SEQ ID NO: 51. In some embodiments, the deubiquitinase comprises an amino acid sequence at least 80%, 81%, 82%, 83%, 84%, 85%, 86%, 87%, 88%, 89%, 90%, 91%, 92%, 93%, 94%, 95%, 96%, 97%, 98%, 99%, or 100% identical to SEQ ID NO: 52. In some embodiments, the deubiquitinase comprises an amino acid sequence at least 80%, 81%, 82%, 83%, 84%, 85%, 86%, 87%, 88%, 89%, 90%, 91%, 92%, 93%, 94%, 95%, 96%, 97%, 98%, 99%, or 100% identical to SEQ ID NO: 53. In some embodiments, the deubiquitinase comprises an amino acid sequence at least 80%, 81%, 82%, 83%, 84%, 85%, 86%, 87%, 88%, 89%, 90%, 91%, 92%, 93%, 94%, 95%, 96%, 97%, 98%, 99%, or 100% identical to SEQ ID NO: 54. In some embodiments, the deubiquitinase comprises an amino acid sequence at least 80%, 81%, 82%, 83%, 84%, 85%, 86%, 87%, 88%, 89%, 90%, 91%, 92%, 93%, 94%, 95%, 96%, 97%, 98%, 99%, or 100% identical to SEQ ID NO: 55. In some embodiments, the deubiquitinase comprises an amino acid sequence at least 80%, 81%, 82%, 83%, 84%, 85%, 86%, 87%, 88%, 89%, 90%, 91%, 92%, 93%, 94%, 95%, 96%, 97%, 98%, 99%, or 100% identical to SEQ ID NO: 56. In some embodiments, the deubiquitinase comprises an amino acid sequence at least 80%, 81%, 82%, 83%, 84%, 85%, 86%, 87%, 88%, 89%, 90%, 91%, 92%, 93%, 94%, 95%, 96%, 97%, 98%, 99%, or 100% identical to SEQ ID NO: 57. In some embodiments, the deubiquitinase comprises an amino acid sequence at least 80%, 81%, 82%, 83%, 84%, 85%, 86%, 87%, 88%, 89%, 90%, 91%, 92%, 93%, 94%, 95%, 96%, 97%, 98%, 99%, or 100% identical to SEQ ID NO: 58. In some embodiments, the deubiquitinase comprises an amino acid sequence at least 80%, 81%, 82%, 83%, 84%, 85%, 86%, 87%, 88%, 89%, 90%, 91%, 92%, 93%, 94%, 95%, 96%, 97%, 98%, 99%, or 100% identical to SEQ ID NO: 59. In some embodiments, the deubiquitinase comprises an amino acid sequence at least 80%, 81%, 82%, 83%, 84%, 85%, 86%, 87%, 88%, 89%, 90%, 91%, 92%, 93%, 94%, 95%, 96%, 97%, 98%, 99%, or 100% identical to SEQ ID NO: 60. In some embodiments, the deubiquitinase comprises an amino acid sequence at least 80%, 81%, 82%, 83%, 84%, 85%, 86%, 87%, 88%, 89%, 90%, 91%, 92%, 93%, 94%, 95%, 96%, 97%, 98%, 99%, or 100% identical to SEQ ID NO: 61. In some embodiments, the deubiquitinase comprises an amino acid sequence at least 80%, 81%, 82%, 83%, 84%, 85%, 86%, 87%, 88%, 89%, 90%, 91%, 92%, 93%, 94%, 95%, 96%, 97%, 98%, 99%, or 100% identical to SEQ ID NO: 62. In some embodiments, the deubiquitinase comprises an amino acid sequence at least 80%, 81%, 82%, 83%, 84%, 85%, 86%, 87%, 88%, 89%, 90%, 91%, 92%, 93%, 94%, 95%, 96%, 97%, 98%, 99%, or 100% identical to SEQ ID NO: 63. In some embodiments, the deubiquitinase comprises an amino acid sequence at least 80%, 81%, 82%, 83%, 84%, 85%, 86%, 87%, 88%, 89%, 90%, 91%, 92%, 93%, 94%, 95%, 96%, 97%, 98%, 99%, or 100% identical to SEQ ID NO: 64. In some embodiments, the deubiquitinase comprises an amino acid sequence at least 80%, 81%, 82%, 83%, 84%, 85%, 86%, 87%, 88%, 89%, 90%, 91%, 92%, 93%, 94%, 95%, 96%, 97%, 98%, 99%, or 100% identical to SEQ ID NO: 65. In some embodiments, the deubiquitinase comprises an amino acid sequence at least 80%, 81%, 82%, 83%, 84%, 85%, 86%, 87%, 88%, 89%, 90%, 91%, 92%, 93%, 94%, 95%, 96%, 97%, 98%, 99%, or 100% identical to SEQ ID NO: 66. In some embodiments, the deubiquitinase comprises an amino acid sequence at least 80%, 81%, 82%, 83%, 84%, 85%, 86%, 87%, 88%, 89%, 90%, 91%, 92%, 93%, 94%, 95%, 96%, 97%, 98%, 99%, or 100% identical to SEQ ID NO: 67. In some embodiments, the deubiquitinase comprises an amino acid sequence at least 80%, 81%, 82%, 83%, 84%, 85%, 86%, 87%, 88%, 89%, 90%, 91%, 92%, 93%, 94%, 95%, 96%, 97%, 98%, 99%, or 100% identical to SEQ ID NO: 68. In some embodiments, the deubiquitinase comprises an amino acid sequence at least 80%, 81%, 82%, 83%, 84%, 85%, 86%, 87%, 88%, 89%, 90%, 91%, 92%, 93%, 94%, 95%, 96%, 97%, 98%, 99%, or 100% identical to SEQ ID NO: 69. In some embodiments, the deubiquitinase comprises an amino acid sequence at least 80%, 81%, 82%, 83%, 84%, 85%, 86%, 87%, 88%, 89%, 90%, 91%, 92%, 93%, 94%, 95%, 96%, 97%, 98%, 99%, or 100% identical to SEQ ID NO: 70. In some embodiments, the deubiquitinase comprises an amino acid sequence at least 80%, 81%, 82%, 83%, 84%, 85%, 86%, 87%, 88%, 89%, 90%, 91%, 92%, 93%, 94%, 95%, 96%, 97%, 98%, 99%, or 100% identical to SEQ ID NO: 71. In some embodiments, the deubiquitinase comprises an amino acid sequence at least 80%, 81%, 82%, 83%, 84%, 85%, 86%, 87%, 88%, 89%, 90%, 91%, 92%, 93%, 94%, 95%, 96%, 97%, 98%, 99%, or 100% identical to SEQ ID NO: 72. In some embodiments, the deubiquitinase comprises an amino acid sequence at least 80%, 81%, 82%, 83%, 84%, 85%, 86%, 87%, 88%, 89%, 90%, 91%, 92%, 93%, 94%, 95%, 96%, 97%, 98%, 99%, or 100% identical to SEQ ID NO: 73. In some embodiments, the deubiquitinase comprises an amino acid sequence at least 80%, 81%, 82%, 83%, 84%, 85%, 86%, 87%, 88%, 89%, 90%, 91%, 92%, 93%, 94%, 95%, 96%, 97%, 98%, 99%, or 100% identical to SEQ ID NO: 74. In some embodiments, the deubiquitinase comprises an amino acid sequence at least 80%, 81%, 82%, 83%, 84%, 85%, 86%, 87%, 88%, 89%, 90%, 91%, 92%, 93%, 94%, 95%, 96%, 97%, 98%, 99%, or 100% identical to SEQ ID NO: 75. In some embodiments, the deubiquitinase comprises an amino acid sequence at least 80%, 81%, 82%, 83%, 84%, 85%, 86%, 87%, 88%, 89%, 90%, 91%, 92%, 93%, 94%, 95%, 96%, 97%, 98%, 99%, or 100% identical to SEQ ID NO: 76. In some embodiments, the deubiquitinase comprises an amino acid sequence at least 80%, 81%, 82%, 83%, 84%, 85%, 86%, 87%, 88%, 89%, 90%, 91%, 92%, 93%, 94%, 95%, 96%, 97%, 98%, 99%, or 100% identical to SEQ ID NO: 77. In some embodiments, the deubiquitinase comprises an amino acid sequence at least 80%, 81%, 82%, 83%, 84%, 85%, 86%, 87%, 88%, 89%, 90%, 91%, 92%, 93%, 94%, 95%, 96%, 97%, 98%, 99%, or 100% identical to SEQ ID NO: 78. In some embodiments, the deubiquitinase comprises an amino acid sequence at least 80%, 81%, 82%, 83%, 84%, 85%, 86%, 87%, 88%, 89%, 90%, 91%, 92%, 93%, 94%, 95%, 96%, 97%, 98%, 99%, or 100% identical to SEQ ID NO: 79. In some embodiments, the deubiquitinase comprises an amino acid sequence at least 80%, 81%, 82%, 83%, 84%, 85%, 86%, 87%, 88%, 89%, 90%, 91%, 92%, 93%, 94%, 95%, 96%, 97%, 98%, 99%, or 100% identical to SEQ ID NO: 80. In some embodiments, the deubiquitinase comprises an amino acid sequence at least 80%, 81%, 82%, 83%, 84%, 85%, 86%, 87%, 88%, 89%, 90%, 91%, 92%, 93%, 94%, 95%, 96%, 97%, 98%, 99%, or 100% identical to SEQ ID NO: 81. In some embodiments, the deubiquitinase comprises an amino acid sequence at least 80%, 81%, 82%, 83%, 84%, 85%, 86%, 87%, 88%, 89%, 90%, 91%, 92%, 93%, 94%, 95%, 96%, 97%, 98%, 99%, or 100% identical to SEQ ID NO: 82. In some embodiments, the deubiquitinase comprises an amino acid sequence at least 80%, 81%, 82%, 83%, 84%, 85%, 86%, 87%, 88%, 89%, 90%, 91%, 92%, 93%, 94%, 95%, 96%, 97%, 98%, 99%, or 100% identical to SEQ ID NO: 83. In some embodiments, the deubiquitinase comprises an amino acid sequence at least 80%, 81%, 82%, 83%, 84%, 85%, 86%, 87%, 88%, 89%, 90%, 91%, 92%, 93%, 94%, 95%, 96%, 97%, 98%, 99%, or 100% identical to SEQ ID NO: 84. In some embodiments, the deubiquitinase comprises an amino acid sequence at least 80%, 81%, 82%, 83%, 84%, 85%, 86%, 87%, 88%, 89%, 90%, 91%, 92%, 93%, 94%, 95%, 96%, 97%, 98%, 99%, or 100% identical to SEQ ID NO: 85. In some embodiments, the deubiquitinase comprises an amino acid sequence at least 80%, 81%, 82%, 83%, 84%, 85%, 86%, 87%, 88%, 89%, 90%, 91%, 92%, 93%, 94%, 95%, 96%, 97%, 98%, 99%, or 100% identical to SEQ ID NO: 86. In some embodiments, the deubiquitinase comprises an amino acid sequence at least 80%, 81%, 82%, 83%, 84%, 85%, 86%, 87%, 88%, 89%, 90%, 91%, 92%, 93%, 94%, 95%, 96%, 97%, 98%, 99%, or 100% identical to SEQ ID NO: 87. In some embodiments, the deubiquitinase comprises an amino acid sequence at least 80%, 81%, 82%, 83%, 84%, 85%, 86%, 87%, 88%, 89%, 90%, 91%, 92%, 93%, 94%, 95%, 96%, 97%, 98%, 99%, or 100% identical to SEQ ID NO: 88. In some embodiments, the deubiquitinase comprises an amino acid sequence at least 80%, 81%, 82%, 83%, 84%, 85%, 86%, 87%, 88%, 89%, 90%, 91%, 92%, 93%, 94%, 95%, 96%, 97%, 98%, 99%, or 100% identical to SEQ ID NO: 89. In some embodiments, the deubiquitinase comprises an amino acid sequence at least 80%, 81%, 82%, 83%, 84%, 85%, 86%, 87%, 88%, 89%, 90%, 91%, 92%, 93%, 94%, 95%, 96%, 97%, 98%, 99%, or 100% identical to SEQ ID NO: 90. In some embodiments, the deubiquitinase comprises an amino acid sequence at least 80%, 81%, 82%, 83%, 84%, 85%, 86%, 87%, 88%, 89%, 90%, 91%, 92%, 93%, 94%, 95%, 96%, 97%, 98%, 99%, or 100% identical to SEQ ID NO: 91. In some embodiments, the deubiquitinase comprises an amino acid sequence at least 80%, 81%, 82%, 83%, 84%, 85%, 86%, 87%, 88%, 89%, 90%, 91%, 92%, 93%, 94%, 95%, 96%, 97%, 98%, 99%, or 100% identical to SEQ ID NO: 92. In some embodiments, the deubiquitinase comprises an amino acid sequence at least 80%, 81%, 82%, 83%, 84%, 85%, 86%, 87%, 88%, 89%, 90%, 91%, 92%, 93%, 94%, 95%, 96%, 97%, 98%, 99%, or 100% identical to SEQ ID NO: 93. In some embodiments, the deubiquitinase comprises an amino acid sequence at least 80%, 81%, 82%, 83%, 84%, 85%, 86%, 87%, 88%, 89%, 90%, 91%, 92%, 93%, 94%, 95%, 96%, 97%, 98%, 99%, or 100% identical to SEQ ID NO: 94. In some embodiments, the deubiquitinase comprises an amino acid sequence at least 80%, 81%, 82%, 83%, 84%, 85%, 86%, 87%, 88%, 89%, 90%, 91%, 92%, 93%, 94%, 95%, 96%, 97%, 98%, 99%, or 100% identical to SEQ ID NO: 95. In some embodiments, the deubiquitinase comprises an amino acid sequence at least 80%, 81%, 82%, 83%, 84%, 85%, 86%, 87%, 88%, 89%, 90%, 91%, 92%, 93%, 94%, 95%, 96%, 97%, 98%, 99%, or 100% identical to SEQ ID NO: 96. In some embodiments, the deubiquitinase comprises an amino acid sequence at least 80%, 81%, 82%, 83%, 84%, 85%, 86%, 87%, 88%, 89%, 90%, 91%, 92%, 93%, 94%, 95%, 96%, 97%, 98%, 99%, or 100% identical to SEQ ID NO: 97. In some embodiments, the deubiquitinase comprises an amino acid sequence at least 80%, 81%, 82%, 83%, 84%, 85%, 86%, 87%, 88%, 89%, 90%, 91%, 92%, 93%, 94%, 95%, 96%, 97%, 98%, 99%, or 100% identical to SEQ ID NO: 98. In some embodiments, the deubiquitinase comprises an amino acid sequence at least 80%, 81%, 82%, 83%, 84%, 85%, 86%, 87%, 88%, 89%, 90%, 91%, 92%, 93%, 94%, 95%, 96%, 97%, 98%, 99%, or 100% identical to SEQ ID NO: 99. In some embodiments, the deubiquitinase comprises an amino acid sequence at least 80%, 81%, 82%, 83%, 84%, 85%, 86%, 87%, 88%, 89%, 90%, 91%, 92%, 93%, 94%, 95%, 96%, 97%, 98%, 99%, or 100% identical to SEQ ID NO: 100. In some embodiments, the deubiquitinase comprises an amino acid sequence at least 80%, 81%, 82%, 83%, 84%, 85%, 86%, 87%, 88%, 89%, 90%, 91%, 92%, 93%, 94%, 95%, 96%, 97%, 98%, 99%, or 100% identical to SEQ ID NO: 101. In some embodiments, the deubiquitinase comprises an amino acid sequence at least 80%, 81%, 82%, 83%, 84%, 85%, 86%, 87%, 88%, 89%, 90%, 91%, 92%, 93%, 94%, 95%, 96%, 97%, 98%, 99%, or 100% identical to SEQ ID NO: 102. In some embodiments, the deubiquitinase comprises an amino acid sequence at least 80%, 81%, 82%, 83%, 84%, 85%, 86%, 87%, 88%, 89%, 90%, 91%, 92%, 93%, 94%, 95%, 96%, 97%, 98%, 99%, or 100% identical to SEQ ID NO: 103. In some embodiments, the deubiquitinase comprises an amino acid sequence at least 80%, 81%, 82%, 83%, 84%, 85%, 86%, 87%, 88%, 89%, 90%, 91%, 92%, 93%, 94%, 95%, 96%, 97%, 98%, 99%, or 100% identical to SEQ ID NO: 104. In some embodiments, the deubiquitinase comprises an amino acid sequence at least 80%, 81%, 82%, 83%, 84%, 85%, 86%, 87%, 88%, 89%, 90%, 91%, 92%, 93%, 94%, 95%, 96%, 97%, 98%, 99%, or 100% identical to SEQ ID NO: 105. In some embodiments, the deubiquitinase comprises an amino acid sequence at least 80%, 81%, 82%, 83%, 84%, 85%, 86%, 87%, 88%, 89%, 90%, 91%, 92%, 93%, 94%, 95%, 96%, 97%, 98%, 99%, or 100% identical to SEQ ID NO: 106. In some embodiments, the deubiquitinase comprises an amino acid sequence at least 80%, 81%, 82%, 83%, 84%, 85%, 86%, 87%, 88%, 89%, 90%, 91%, 92%, 93%, 94%, 95%, 96%, 97%, 98%, 99%, or 100% identical to SEQ ID NO: 107. In some embodiments, the deubiquitinase comprises an amino acid sequence at least 80%, 81%, 82%, 83%, 84%, 85%, 86%, 87%, 88%, 89%, 90%, 91%, 92%, 93%, 94%, 95%, 96%, 97%, 98%, 99%, or 100% identical to SEQ ID NO: 108. In some embodiments, the deubiquitinase comprises an amino acid sequence at least 80%, 81%, 82%, 83%, 84%, 85%, 86%, 87%, 88%, 89%, 90%, 91%, 92%, 93%, 94%, 95%, 96%, 97%, 98%, 99%, or 100% identical to SEQ ID NO: 109. In some embodiments, the deubiquitinase comprises an amino acid sequence at least 80%, 81%, 82%, 83%, 84%, 85%, 86%, 87%, 88%, 89%, 90%, 91%, 92%, 93%, 94%, 95%, 96%, 97%, 98%, 99%, or 100% identical to SEQ ID NO: 110. In some embodiments, the deubiquitinase comprises an amino acid sequence at least 80%, 81%, 82%, 83%, 84%, 85%, 86%, 87%, 88%, 89%, 90%, 91%, 92%, 93%, 94%, 95%, 96%, 97%, 98%, 99%, or 100% identical to SEQ ID NO: 111. In some embodiments, the deubiquitinase comprises an amino acid sequence at least 80%, 81%, 82%, 83%, 84%, 85%, 86%, 87%, 88%, 89%, 90%, 91%, 92%, 93%, 94%, 95%, 96%, 97%, 98%, 99%, or 100% identical to SEQ ID NO: 112.

[0143] In some embodiments, the amino acid sequence of the effector domain comprises an amino acid sequence at least 80%, 81%, 82%, 83%, 84%, 85%, 86%, 87%, 88%, 89%, 90%, 91%, 92%, 93%, 94%, 95%, 96%, 97%, 98%, 99%, or 100% identical to the amino acid sequence of the catalytic domain of any one of SEQ ID NOS: 1-112. In some embodiments, the amino acid sequence of the effector domain consists of an amino acid sequence at least 80%, 81%, 82%, 83%, 84%, 85%, 86%, 87%, 88%, 89%, 90%, 91%, 92%, 93%, 94%, 95%, 96%, 97%, 98%, 99%, or 100% identical to the amino acid sequence of the catalytic domain of any one of SEQ ID NOS: 1-112.

[0144] In some embodiments, the amino acid sequence of the effector domain comprises an amino acid sequence at least 80%, 81%, 82%, 83%, 84%, 85%, 86%, 87%, 88%, 89%, 90%, 91%, 92%, 93%, 94%, 95%, 96%, 97%, 98%, 99%, or 100% identical to the amino acid sequence of the catalytic domain of SEQ ID NO: 1. In some embodiments, the amino acid sequence of the effector domain comprises an amino acid sequence at least 80%, 81%, 82%, 83%, 84%, 85%, 86%, 87%, 88%, 89%, 90%, 91%, 92%, 93%, 94%, 95%, 96%, 97%, 98%, 99%, or 100% identical to the amino acid sequence of the catalytic domain of SEQ ID NO: 2. In some embodiments, the amino acid sequence of the effector domain comprises an amino acid sequence at least 80%, 81%, 82%, 83%, 84%, 85%, 86%, 87%, 88%, 89%, 90%, 91%, 92%, 93%, 94%, 95%, 96%, 97%, 98%, 99%, or 100% identical to the amino acid sequence of the catalytic domain of SEQ ID NO: 3. In some embodiments, the amino acid sequence of the effector domain comprises an amino acid sequence at least 80%, 81%, 82%, 83%, 84%, 85%, 86%, 87%, 88%, 89%, 90%, 91%, 92%, 93%, 94%, 95%, 96%, 97%, 98%, 99%, or 100% identical to the amino acid sequence of the catalytic domain of SEQ ID NO: 4. In some embodiments, the amino acid sequence of the effector domain comprises an amino acid sequence at least 80%, 81%, 82%, 83%, 84%, 85%, 86%, 87%, 88%, 89%, 90%, 91%, 92%, 93%, 94%, 95%, 96%, 97%, 98%, 99%, or 100% identical to the amino acid sequence of the catalytic domain of SEQ ID NO: 5. In some embodiments, the amino acid sequence of the effector domain comprises an amino acid sequence at least 80%, 81%, 82%, 83%, 84%, 85%, 86%, 87%, 88%, 89%, 90%, 91%, 92%, 93%, 94%, 95%, 96%, 97%, 98%, 99%, or 100% identical to the amino acid sequence of the catalytic domain of SEQ ID NO: 6. In some embodiments, the amino acid sequence of the effector domain comprises an amino acid sequence at least 80%, 81%, 82%, 83%, 84%, 85%, 86%, 87%, 88%, 89%, 90%, 91%, 92%, 93%, 94%, 95%, 96%, 97%, 98%, 99%, or 100% identical to the amino acid sequence of the catalytic domain of SEQ ID NO: 7. In some embodiments, the amino acid sequence of the effector domain comprises an amino acid sequence at least 80%, 81%, 82%, 83%, 84%, 85%, 86%, 87%, 88%, 89%, 90%, 91%, 92%, 93%, 94%, 95%, 96%, 97%, 98%, 99%, or 100% identical to the amino acid sequence of the catalytic domain of SEQ ID NO: 8. In some embodiments, the amino acid sequence of the effector domain comprises an amino acid sequence at least 80%, 81%, 82%, 83%, 84%, 85%, 86%, 87%, 88%, 89%, 90%, 91%, 92%, 93%, 94%, 95%, 96%, 97%, 98%, 99%, or 100% identical to the amino acid sequence of the catalytic domain of SEQ ID NO: 9. In some embodiments, the amino acid sequence of the effector domain comprises an amino acid sequence at least 80%, 81%, 82%, 83%, 84%, 85%, 86%, 87%, 88%, 89%, 90%, 91%, 92%, 93%, 94%, 95%, 96%, 97%, 98%, 99%, or 100% identical to the amino acid sequence of the catalytic domain of SEQ ID NO: 10. In some embodiments, the amino acid sequence of the effector domain comprises an amino acid sequence at least 80%, 81%, 82%, 83%, 84%, 85%, 86%, 87%, 88%, 89%, 90%, 91%, 92%, 93%, 94%, 95%, 96%, 97%, 98%, 99%, or 100% identical to the amino acid sequence of the catalytic domain of SEQ ID NO: 11. In some embodiments, the amino acid sequence of the effector domain comprises an amino acid sequence at least 80%, 81%, 82%, 83%, 84%, 85%, 86%, 87%, 88%, 89%, 90%, 91%, 92%, 93%, 94%, 95%, 96%, 97%, 98%, 99%, or 100% identical to the amino acid sequence of the catalytic domain of SEQ ID NO: 12. In some embodiments, the amino acid sequence of the effector domain comprises an amino acid sequence at least 80%, 81%, 82%, 83%, 84%, 85%, 86%, 87%, 88%, 89%, 90%, 91%, 92%, 93%, 94%, 95%, 96%, 97%, 98%, 99%, or 100% identical to the amino acid sequence of the catalytic domain of SEQ ID NO: 13. In some embodiments, the amino acid sequence of the effector domain comprises an amino acid sequence at least 80%, 81%, 82%, 83%, 84%, 85%, 86%, 87%, 88%, 89%, 90%, 91%, 92%, 93%, 94%, 95%, 96%, 97%, 98%, 99%, or 100% identical to the amino acid sequence of the catalytic domain of SEQ ID NO: 14. In some embodiments, the amino acid sequence of the effector domain comprises an amino acid sequence at least 80%, 81%, 82%, 83%, 84%, 85%, 86%, 87%, 88%, 89%, 90%, 91%, 92%, 93%, 94%, 95%, 96%, 97%, 98%, 99%, or 100% identical to the amino acid sequence of the catalytic domain of SEQ ID NO: 15. In some embodiments, the amino acid sequence of the effector domain comprises an amino acid sequence at least 80%, 81%, 82%, 83%, 84%, 85%, 86%, 87%, 88%, 89%, 90%, 91%, 92%, 93%, 94%, 95%, 96%, 97%, 98%, 99%, or 100% identical to the amino acid sequence of the catalytic domain of SEQ ID NO: 16. In some embodiments, the amino acid sequence of the effector domain comprises an amino acid sequence at least 80%, 81%, 82%, 83%, 84%, 85%, 86%, 87%, 88%, 89%, 90%, 91%, 92%, 93%, 94%, 95%, 96%, 97%, 98%, 99%, or 100% identical to the amino acid sequence of the catalytic domain of SEQ ID NO: 17. In some embodiments, the amino acid sequence of the effector domain comprises an amino acid sequence at least 80%, 81%, 82%, 83%, 84%, 85%, 86%, 87%, 88%, 89%, 90%, 91%, 92%, 93%, 94%, 95%, 96%, 97%, 98%, 99%, or 100% identical to the amino acid sequence of the catalytic domain of SEQ ID NO: 18. In some embodiments, the amino acid sequence of the effector domain comprises an amino acid sequence at least 80%, 81%, 82%, 83%, 84%, 85%, 86%, 87%, 88%, 89%, 90%, 91%, 92%, 93%, 94%, 95%, 96%, 97%, 98%, 99%, or 100% identical to the amino acid sequence of the catalytic domain of SEQ ID NO: 19. In some embodiments, the amino acid sequence of the effector domain comprises an amino acid sequence at least 80%, 81%, 82%, 83%, 84%, 85%, 86%, 87%, 88%, 89%, 90%, 91%, 92%, 93%, 94%, 95%, 96%, 97%, 98%, 99%, or 100% identical to the amino acid sequence of the catalytic domain of SEQ ID NO: 20. In some embodiments, the amino acid sequence of the effector domain comprises an amino acid sequence at least 80%, 81%, 82%, 83%, 84%, 85%, 86%, 87%, 88%, 89%, 90%, 91%, 92%, 93%, 94%, 95%, 96%, 97%, 98%, 99%, or 100% identical to the amino acid sequence of the catalytic domain of SEQ ID NO: 21. In some embodiments, the amino acid sequence of the effector domain comprises an amino acid sequence at least 80%, 81%, 82%, 83%, 84%, 85%, 86%, 87%, 88%, 89%, 90%, 91%, 92%, 93%, 94%, 95%, 96%, 97%, 98%, 99%, or 100% identical to the amino acid sequence of the catalytic domain of SEQ ID NO: 22. In some embodiments, the amino acid sequence of the effector domain comprises an amino acid sequence at least 80%, 81%, 82%, 83%, 84%, 85%, 86%, 87%, 88%, 89%, 90%, 91%, 92%, 93%, 94%, 95%, 96%, 97%, 98%, 99%, or 100% identical to the amino acid sequence of the catalytic domain of SEQ ID NO: 23. In some embodiments, the amino acid sequence of the effector domain comprises an amino acid sequence at least 80%, 81%, 82%, 83%, 84%, 85%, 86%, 87%, 88%, 89%, 90%, 91%, 92%, 93%, 94%, 95%, 96%, 97%, 98%, 99%, or 100% identical to the amino acid sequence of the catalytic domain of SEQ ID NO: 24. In some embodiments, the amino acid sequence of the effector domain comprises an amino acid sequence at least 80%, 81%, 82%, 83%, 84%, 85%, 86%, 87%, 88%, 89%, 90%, 91%, 92%, 93%, 94%, 95%, 96%, 97%, 98%, 99%, or 100% identical to the amino acid sequence of the catalytic domain of SEQ ID NO: 25. In some embodiments, the amino acid sequence of the effector domain comprises an amino acid sequence at least 80%, 81%, 82%, 83%, 84%, 85%, 86%, 87%, 88%, 89%, 90%, 91%, 92%, 93%, 94%, 95%, 96%, 97%, 98%, 99%, or 100% identical to the amino acid sequence of the catalytic domain of SEQ ID NO: 26. In some embodiments, the amino acid sequence of the effector domain comprises an amino acid sequence at least 80%, 81%, 82%, 83%, 84%, 85%, 86%, 87%, 88%, 89%, 90%, 91%, 92%, 93%, 94%, 95%, 96%, 97%, 98%, 99%, or 100% identical to the amino acid sequence of the catalytic domain of SEQ ID NO: 27. In some embodiments, the amino acid sequence of the effector domain comprises an amino acid sequence at least 80%, 81%, 82%, 83%, 84%, 85%, 86%, 87%, 88%, 89%, 90%, 91%, 92%, 93%, 94%, 95%, 96%, 97%, 98%, 99%, or 100% identical to the amino acid sequence of the catalytic domain of SEQ ID NO: 28. In some embodiments, the amino acid sequence of the effector domain comprises an amino acid sequence at least 80%, 81%, 82%, 83%, 84%, 85%, 86%, 87%, 88%, 89%, 90%, 91%, 92%, 93%, 94%, 95%, 96%, 97%, 98%, 99%, or 100% identical to the amino acid sequence of the catalytic domain of SEQ ID NO: 29. In some embodiments, the amino acid sequence of the effector domain comprises an amino acid sequence at least 80%, 81%, 82%, 83%, 84%, 85%, 86%, 87%, 88%, 89%, 90%, 91%, 92%, 93%, 94%, 95%, 96%, 97%, 98%, 99%, or 100% identical to the amino acid sequence of the catalytic domain of SEQ ID NO: 30. In some embodiments, the amino acid sequence of the effector domain comprises an amino acid sequence at least 80%, 81%, 82%, 83%, 84%, 85%, 86%, 87%, 88%, 89%, 90%, 91%, 92%, 93%, 94%, 95%, 96%, 97%, 98%, 99%, or 100% identical to the amino acid sequence of the catalytic domain of SEQ ID NO: 31. In some embodiments, the amino acid sequence of the effector domain comprises an amino acid sequence at least 80%, 81%, 82%, 83%, 84%, 85%, 86%, 87%, 88%, 89%, 90%, 91%, 92%, 93%, 94%, 95%, 96%, 97%, 98%, 99%, or 100% identical to the amino acid sequence of the catalytic domain of SEQ ID NO: 32. In some embodiments, the amino acid sequence of the effector domain comprises an amino acid sequence at least 80%, 81%, 82%, 83%, 84%, 85%, 86%, 87%, 88%, 89%, 90%, 91%, 92%, 93%, 94%, 95%, 96%, 97%, 98%, 99%, or 100% identical to the amino acid sequence of the catalytic domain of SEQ ID NO: 33. In some embodiments, the amino acid sequence of the effector domain comprises an amino acid sequence at least 80%, 81%, 82%, 83%, 84%, 85%, 86%, 87%, 88%, 89%, 90%, 91%, 92%, 93%, 94%, 95%, 96%, 97%, 98%, 99%, or 100% identical to the amino acid sequence of the catalytic domain of SEQ ID NO: 34. In some embodiments, the amino acid sequence of the effector domain comprises an amino acid sequence at least 80%, 81%, 82%, 83%, 84%, 85%, 86%, 87%, 88%, 89%, 90%, 91%, 92%, 93%, 94%, 95%, 96%, 97%, 98%, 99%, or 100% identical to the amino acid sequence of the catalytic domain of SEQ ID NO: 35. In some embodiments, the amino acid sequence of the effector domain comprises an amino acid sequence at least 80%, 81%, 82%, 83%, 84%, 85%, 86%, 87%, 88%, 89%, 90%, 91%, 92%, 93%, 94%, 95%, 96%, 97%, 98%, 99%, or 100% identical to the amino acid sequence of the catalytic domain of SEQ ID NO: 36. In some embodiments, the amino acid sequence of the effector domain comprises an amino acid sequence at least 80%, 81%, 82%, 83%, 84%, 85%, 86%, 87%, 88%, 89%, 90%, 91%, 92%, 93%, 94%, 95%, 96%, 97%, 98%, 99%, or 100% identical to the amino acid sequence of the catalytic domain of SEQ ID NO: 37. In some embodiments, the amino acid sequence of the effector domain comprises an amino acid sequence at least 80%, 81%, 82%, 83%, 84%, 85%, 86%, 87%, 88%, 89%, 90%, 91%, 92%, 93%, 94%, 95%, 96%, 97%, 98%, 99%, or 100% identical to the amino acid sequence of the catalytic domain of SEQ ID NO: 38. In some embodiments, the amino acid sequence of the effector domain comprises an amino acid sequence at least 80%, 81%, 82%, 83%, 84%, 85%, 86%, 87%, 88%, 89%, 90%, 91%, 92%, 93%, 94%, 95%, 96%, 97%, 98%, 99%, or 100% identical to the amino acid sequence of the catalytic domain of SEQ ID NO: 39. In some embodiments, the amino acid sequence of the effector domain comprises an amino acid sequence at least 80%, 81%, 82%, 83%, 84%, 85%, 86%, 87%, 88%, 89%, 90%, 91%, 92%, 93%, 94%, 95%, 96%, 97%, 98%, 99%, or 100% identical to the amino acid sequence of the catalytic domain of SEQ ID NO: 40. In some embodiments, the amino acid sequence of the effector domain comprises an amino acid sequence at least 80%, 81%, 82%, 83%, 84%, 85%, 86%, 87%, 88%, 89%, 90%, 91%, 92%, 93%, 94%, 95%, 96%, 97%, 98%, 99%, or 100% identical to the amino acid sequence of the catalytic domain of SEQ ID NO: 41. In some embodiments, the amino acid sequence of the effector domain comprises an amino acid sequence at least 80%, 81%, 82%, 83%, 84%, 85%, 86%, 87%, 88%, 89%, 90%, 91%, 92%, 93%, 94%, 95%, 96%, 97%, 98%, 99%, or 100% identical to the amino acid sequence of the catalytic domain of SEQ ID NO: 42. In some embodiments, the amino acid sequence of the effector domain comprises an amino acid sequence at least 80%, 81%, 82%, 83%, 84%, 85%, 86%, 87%, 88%, 89%, 90%, 91%, 92%, 93%, 94%, 95%, 96%, 97%, 98%, 99%, or 100% identical to the amino acid sequence of the catalytic domain of SEQ ID NO: 43. In some embodiments, the amino acid sequence of the effector domain comprises an amino acid sequence at least 80%, 81%, 82%, 83%, 84%, 85%, 86%, 87%, 88%, 89%, 90%, 91%, 92%, 93%, 94%, 95%, 96%, 97%, 98%, 99%, or 100% identical to the amino acid sequence of the catalytic domain of SEQ ID NO: 44. In some embodiments, the amino acid sequence of the effector domain comprises an amino acid sequence at least 80%, 81%, 82%, 83%, 84%, 85%, 86%, 87%, 88%, 89%, 90%, 91%, 92%, 93%, 94%, 95%, 96%, 97%, 98%, 99%, or 100% identical to the amino acid sequence of the catalytic domain of SEQ ID NO: 45. In some embodiments, the amino acid sequence of the effector domain comprises an amino acid sequence at least 80%, 81%, 82%, 83%, 84%, 85%, 86%, 87%, 88%, 89%, 90%, 91%, 92%, 93%, 94%, 95%, 96%, 97%, 98%, 99%, or 100% identical to the amino acid sequence of the catalytic domain of SEQ ID NO: 46. In some embodiments, the amino acid sequence of the effector domain comprises an amino acid sequence at least 80%, 81%, 82%, 83%, 84%, 85%, 86%, 87%, 88%, 89%, 90%, 91%, 92%, 93%, 94%, 95%, 96%, 97%, 98%, 99%, or 100% identical to the amino acid sequence of the catalytic domain of SEQ ID NO: 47. In some embodiments, the amino acid sequence of the effector domain comprises an amino acid sequence at least 80%, 81%, 82%, 83%, 84%, 85%, 86%, 87%, 88%, 89%, 90%, 91%, 92%, 93%, 94%, 95%, 96%, 97%, 98%, 99%, or 100% identical to the amino acid sequence of the catalytic domain of SEQ ID NO: 48. In some embodiments, the amino acid sequence of the effector domain comprises an amino acid sequence at least 80%, 81%, 82%, 83%, 84%, 85%, 86%, 87%, 88%, 89%, 90%, 91%, 92%, 93%, 94%, 95%, 96%, 97%, 98%, 99%, or 100% identical to the amino acid sequence of the catalytic domain of SEQ ID NO: 49. In some embodiments, the amino acid sequence of the effector domain comprises an amino acid sequence at least 80%, 81%, 82%, 83%, 84%, 85%, 86%, 87%, 88%, 89%, 90%, 91%, 92%, 93%, 94%, 95%, 96%, 97%, 98%, 99%, or 100% identical to the amino acid sequence of the catalytic domain of SEQ ID NO: 50. In some embodiments, the amino acid sequence of the effector domain comprises an amino acid sequence at least 80%, 81%, 82%, 83%, 84%, 85%, 86%, 87%, 88%, 89%, 90%, 91%, 92%, 93%, 94%, 95%, 96%, 97%, 98%, 99%, or 100% identical to the amino acid sequence of the catalytic domain of SEQ ID NO: 51. In some embodiments, the amino acid sequence of the effector domain comprises an amino acid sequence at least 80%, 81%, 82%, 83%, 84%, 85%, 86%, 87%, 88%, 89%, 90%, 91%, 92%, 93%, 94%, 95%, 96%, 97%, 98%, 99%, or 100% identical to the amino acid sequence of the catalytic domain of SEQ ID NO: 52. In some embodiments, the amino acid sequence of the effector domain comprises an amino acid sequence at least 80%, 81%, 82%, 83%, 84%, 85%, 86%, 87%, 88%, 89%, 90%, 91%, 92%, 93%, 94%, 95%, 96%, 97%, 98%, 99%, or 100% identical to the amino acid sequence of the catalytic domain of SEQ ID NO: 53. In some embodiments, the amino acid sequence of the effector domain comprises an amino acid sequence at least 80%, 81%, 82%, 83%, 84%, 85%, 86%, 87%, 88%, 89%, 90%, 91%, 92%, 93%, 94%, 95%, 96%, 97%, 98%, 99%, or 100% identical to the amino acid sequence of the catalytic domain of SEQ ID NO: 54. In some embodiments, the amino acid sequence of the effector domain comprises an amino acid sequence at least 80%, 81%, 82%, 83%, 84%, 85%, 86%, 87%, 88%, 89%, 90%, 91%, 92%, 93%, 94%, 95%, 96%, 97%, 98%, 99%, or 100% identical to the amino acid sequence of the catalytic domain of SEQ ID NO: 55. In some embodiments, the amino acid sequence of the effector domain comprises an amino acid sequence at least 80%, 81%, 82%, 83%, 84%, 85%, 86%, 87%, 88%, 89%, 90%, 91%, 92%, 93%, 94%, 95%, 96%, 97%, 98%, 99%, or 100% identical to the amino acid sequence of the catalytic domain of SEQ ID NO: 56. In some embodiments, the amino acid sequence of the effector domain comprises an amino acid sequence at least 80%, 81%, 82%, 83%, 84%, 85%, 86%, 87%, 88%, 89%, 90%, 91%, 92%, 93%, 94%, 95%, 96%, 97%, 98%, 99%, or 100% identical to the amino acid sequence of the catalytic domain of SEQ ID NO: 57. In some embodiments, the amino acid sequence of the effector domain comprises an amino acid sequence at least 80%, 81%, 82%, 83%, 84%, 85%, 86%, 87%, 88%, 89%, 90%, 91%, 92%, 93%, 94%, 95%, 96%, 97%, 98%, 99%, or 100% identical to the amino acid sequence of the catalytic domain of SEQ ID NO: 58. In some embodiments, the amino acid sequence of the effector domain comprises an amino acid sequence at least 80%, 81%, 82%, 83%, 84%, 85%, 86%, 87%, 88%, 89%, 90%, 91%, 92%, 93%, 94%, 95%, 96%, 97%, 98%, 99%, or 100% identical to the amino acid sequence of the catalytic domain of SEQ ID NO: 59. In some embodiments, the amino acid sequence of the effector domain comprises an amino acid sequence at least 80%, 81%, 82%, 83%, 84%, 85%, 86%, 87%, 88%, 89%, 90%, 91%, 92%, 93%, 94%, 95%, 96%, 97%, 98%, 99%, or 100% identical to the amino acid sequence of the catalytic domain of SEQ ID NO: 60. In some embodiments, the amino acid sequence of the effector domain comprises an amino acid sequence at least 80%, 81%, 82%, 83%, 84%, 85%, 86%, 87%, 88%, 89%, 90%, 91%, 92%, 93%, 94%, 95%, 96%, 97%, 98%, 99%, or 100% identical to the amino acid sequence of the catalytic domain of SEQ ID NO: 61. In some embodiments, the amino acid sequence of the effector domain comprises an amino acid sequence at least 80%, 81%, 82%, 83%, 84%, 85%, 86%, 87%, 88%, 89%, 90%, 91%, 92%, 93%, 94%, 95%, 96%, 97%, 98%, 99%, or 100% identical to the amino acid sequence of the catalytic domain of SEQ ID NO: 62. In some embodiments, the amino acid sequence of the effector domain comprises an amino acid sequence at least 80%, 81%, 82%, 83%, 84%, 85%, 86%, 87%, 88%, 89%, 90%, 91%, 92%, 93%, 94%, 95%, 96%, 97%, 98%, 99%, or 100% identical to the amino acid sequence of the catalytic domain of SEQ ID NO: 63. In some embodiments, the amino acid sequence of the effector domain comprises an amino acid sequence at least 80%, 81%, 82%, 83%, 84%, 85%, 86%, 87%, 88%, 89%, 90%, 91%, 92%, 93%, 94%, 95%, 96%, 97%, 98%, 99%, or 100% identical to the amino acid sequence of the catalytic domain of SEQ ID NO: 64. In some embodiments, the amino acid sequence of the effector domain comprises an amino acid sequence at least 80%, 81%, 82%, 83%, 84%, 85%, 86%, 87%, 88%, 89%, 90%, 91%, 92%, 93%, 94%, 95%, 96%, 97%, 98%, 99%, or 100% identical to the amino acid sequence of the catalytic domain of SEQ ID NO: 65. In some embodiments, the amino acid sequence of the effector domain comprises an amino acid sequence at least 80%, 81%, 82%, 83%, 84%, 85%, 86%, 87%, 88%, 89%, 90%, 91%, 92%, 93%, 94%, 95%, 96%, 97%, 98%, 99%, or 100% identical to the amino acid sequence of the catalytic domain of SEQ ID NO: 66. In some embodiments, the amino acid sequence of the effector domain comprises an amino acid sequence at least 80%, 81%, 82%, 83%, 84%, 85%, 86%, 87%, 88%, 89%, 90%, 91%, 92%, 93%, 94%, 95%, 96%, 97%, 98%, 99%, or 100% identical to the amino acid sequence of the catalytic domain of SEQ ID NO: 67. In some embodiments, the amino acid sequence of the effector domain comprises an amino acid sequence at least 80%, 81%, 82%, 83%, 84%, 85%, 86%, 87%, 88%, 89%, 90%, 91%, 92%, 93%, 94%, 95%, 96%, 97%, 98%, 99%, or 100% identical to the amino acid sequence of the catalytic domain of SEQ ID NO: 68. In some embodiments, the amino acid sequence of the effector domain comprises an amino acid sequence at least 80%, 81%, 82%, 83%, 84%, 85%, 86%, 87%, 88%, 89%, 90%, 91%, 92%, 93%, 94%, 95%, 96%, 97%, 98%, 99%, or 100% identical to the amino acid sequence of the catalytic domain of SEQ ID NO: 69. In some embodiments, the amino acid sequence of the effector domain comprises an amino acid sequence at least 80%, 81%, 82%, 83%, 84%, 85%, 86%, 87%, 88%, 89%, 90%, 91%, 92%, 93%, 94%, 95%, 96%, 97%, 98%, 99%, or 100% identical to the amino acid sequence of the catalytic domain of SEQ ID NO: 70. In some embodiments, the amino acid sequence of the effector domain comprises an amino acid sequence at least 80%, 81%, 82%, 83%, 84%, 85%, 86%, 87%, 88%, 89%, 90%, 91%, 92%, 93%, 94%, 95%, 96%, 97%, 98%, 99%, or 100% identical to the amino acid sequence of the catalytic domain of SEQ ID NO: 71. In some embodiments, the amino acid sequence of the effector domain comprises an amino acid sequence at least 80%, 81%, 82%, 83%, 84%, 85%, 86%, 87%, 88%, 89%, 90%, 91%, 92%, 93%, 94%, 95%, 96%, 97%, 98%, 99%, or 100% identical to the amino acid sequence of the catalytic domain of SEQ ID NO: 72. In some embodiments, the amino acid sequence of the effector domain comprises an amino acid sequence at least 80%, 81%, 82%, 83%, 84%, 85%, 86%, 87%, 88%, 89%, 90%, 91%, 92%, 93%, 94%, 95%, 96%, 97%, 98%, 99%, or 100% identical to the amino acid sequence of the catalytic domain of SEQ ID NO: 73. In some embodiments, the amino acid sequence of the effector domain comprises an amino acid sequence at least 80%, 81%, 82%, 83%, 84%, 85%, 86%, 87%, 88%, 89%, 90%, 91%, 92%, 93%, 94%, 95%, 96%, 97%, 98%, 99%, or 100% identical to the amino acid sequence of the catalytic domain of SEQ ID NO: 74. In some embodiments, the amino acid sequence of the effector domain comprises an amino acid sequence at least 80%, 81%, 82%, 83%, 84%, 85%, 86%, 87%, 88%, 89%, 90%, 91%, 92%, 93%, 94%, 95%, 96%, 97%, 98%, 99%, or 100% identical to the amino acid sequence of the catalytic domain of SEQ ID NO: 75. In some embodiments, the amino acid sequence of the effector domain comprises an amino acid sequence at least 80%, 81%, 82%, 83%, 84%, 85%, 86%, 87%, 88%, 89%, 90%, 91%, 92%, 93%, 94%, 95%, 96%, 97%, 98%, 99%, or 100% identical to the amino acid sequence of the catalytic domain of SEQ ID NO: 76. In some embodiments, the amino acid sequence of the effector domain comprises an amino acid sequence at least 80%, 81%, 82%, 83%, 84%, 85%, 86%, 87%, 88%, 89%, 90%, 91%, 92%, 93%, 94%, 95%, 96%, 97%, 98%, 99%, or 100% identical to the amino acid sequence of the catalytic domain of SEQ ID NO: 77. In some embodiments, the amino acid sequence of the effector domain comprises an amino acid sequence at least 80%, 81%, 82%, 83%, 84%, 85%, 86%, 87%, 88%, 89%, 90%, 91%, 92%, 93%, 94%, 95%, 96%, 97%, 98%, 99%, or 100% identical to the amino acid sequence of the catalytic domain of SEQ ID NO: 78. In some embodiments, the amino acid sequence of the effector domain comprises an amino acid sequence at least 80%, 81%, 82%, 83%, 84%, 85%, 86%, 87%, 88%, 89%, 90%, 91%, 92%, 93%, 94%, 95%, 96%, 97%, 98%, 99%, or 100% identical to the amino acid sequence of the catalytic domain of SEQ ID NO: 79. In some embodiments, the amino acid sequence of the effector domain comprises an amino acid sequence at least 80%, 81%, 82%, 83%, 84%, 85%, 86%, 87%, 88%, 89%, 90%, 91%, 92%, 93%, 94%, 95%, 96%, 97%, 98%, 99%, or 100% identical to the amino acid sequence of the catalytic domain of SEQ ID NO: 80. In some embodiments, the amino acid sequence of the effector domain comprises an amino acid sequence at least 80%, 81%, 82%, 83%, 84%, 85%, 86%, 87%, 88%, 89%, 90%, 91%, 92%, 93%, 94%, 95%, 96%, 97%, 98%, 99%, or 100% identical to the amino acid sequence of the catalytic domain of SEQ ID NO: 81. In some embodiments, the amino acid sequence of the effector domain comprises an amino acid sequence at least 80%, 81%, 82%, 83%, 84%, 85%, 86%, 87%, 88%, 89%, 90%, 91%, 92%, 93%, 94%, 95%, 96%, 97%, 98%, 99%, or 100% identical to the amino acid sequence of the catalytic domain of SEQ ID NO: 82. In some embodiments, the amino acid sequence of the effector domain comprises an amino acid sequence at least 80%, 81%, 82%, 83%, 84%, 85%, 86%, 87%, 88%, 89%, 90%, 91%, 92%, 93%, 94%, 95%, 96%, 97%, 98%, 99%, or 100% identical to the amino acid sequence of the catalytic domain of SEQ ID NO: 83. In some embodiments, the amino acid sequence of the effector domain comprises an amino acid sequence at least 80%, 81%, 82%, 83%, 84%, 85%, 86%, 87%, 88%, 89%, 90%, 91%, 92%, 93%, 94%, 95%, 96%, 97%, 98%, 99%, or 100% identical to the amino acid sequence of the catalytic domain of SEQ ID NO: 84. In some embodiments, the amino acid sequence of the effector domain comprises an amino acid sequence at least 80%, 81%, 82%, 83%, 84%, 85%, 86%, 87%, 88%, 89%, 90%, 91%, 92%, 93%, 94%, 95%, 96%, 97%, 98%, 99%, or 100% identical to the amino acid sequence of the catalytic domain of SEQ ID NO: 85. In some embodiments, the amino acid sequence of the effector domain comprises an amino acid sequence at least 80%, 81%, 82%, 83%, 84%, 85%, 86%, 87%, 88%, 89%, 90%, 91%, 92%, 93%, 94%, 95%, 96%, 97%, 98%, 99%, or 100% identical to the amino acid sequence of the catalytic domain of SEQ ID NO: 86. In some embodiments, the amino acid sequence of the effector domain comprises an amino acid sequence at least 80%, 81%, 82%, 83%, 84%, 85%, 86%, 87%, 88%, 89%, 90%, 91%, 92%, 93%, 94%, 95%, 96%, 97%, 98%, 99%, or 100% identical to the amino acid sequence of the catalytic domain of SEQ ID NO: 87. In some embodiments, the amino acid sequence of the effector domain comprises an amino acid sequence at least 80%, 81%, 82%, 83%, 84%, 85%, 86%, 87%, 88%, 89%, 90%, 91%, 92%, 93%, 94%, 95%, 96%, 97%, 98%, 99%, or 100% identical to the amino acid sequence of the catalytic domain of SEQ ID NO: 88. In some embodiments, the amino acid sequence of the effector domain comprises an amino acid sequence at least 80%, 81%, 82%, 83%, 84%, 85%, 86%, 87%, 88%, 89%, 90%, 91%, 92%, 93%, 94%, 95%, 96%, 97%, 98%, 99%, or 100% identical to the amino acid sequence of the catalytic domain of SEQ ID NO: 89. In some embodiments, the amino acid sequence of the effector domain comprises an amino acid sequence at least 80%, 81%, 82%, 83%, 84%, 85%, 86%, 87%, 88%, 89%, 90%, 91%, 92%, 93%, 94%, 95%, 96%, 97%, 98%, 99%, or 100% identical to the amino acid sequence of the catalytic domain of SEQ ID NO: 90. In some embodiments, the amino acid sequence of the effector domain comprises an amino acid sequence at least 80%, 81%, 82%, 83%, 84%, 85%, 86%, 87%, 88%, 89%, 90%, 91%, 92%, 93%, 94%, 95%, 96%, 97%, 98%, 99%, or 100% identical to the amino acid sequence of the catalytic domain of SEQ ID NO: 91. In some embodiments, the amino acid sequence of the effector domain comprises an amino acid sequence at least 80%, 81%, 82%, 83%, 84%, 85%, 86%, 87%, 88%, 89%, 90%, 91%, 92%, 93%, 94%, 95%, 96%, 97%, 98%, 99%, or 100% identical to the amino acid sequence of the catalytic domain of SEQ ID NO: 92. In some embodiments, the amino acid sequence of the effector domain comprises an amino acid sequence at least 80%, 81%, 82%, 83%, 84%, 85%, 86%, 87%, 88%, 89%, 90%, 91%, 92%, 93%, 94%, 95%, 96%, 97%, 98%, 99%, or 100% identical to the amino acid sequence of the catalytic domain of SEQ ID NO: 93. In some embodiments, the amino acid sequence of the effector domain comprises an amino acid sequence at least 80%, 81%, 82%, 83%, 84%, 85%, 86%, 87%, 88%, 89%, 90%, 91%, 92%, 93%, 94%, 95%, 96%, 97%, 98%, 99%, or 100% identical to the amino acid sequence of the catalytic domain of SEQ ID NO: 94. In some embodiments, the amino acid sequence of the effector domain comprises an amino acid sequence at least 80%, 81%, 82%, 83%, 84%, 85%, 86%, 87%, 88%, 89%, 90%, 91%, 92%, 93%, 94%, 95%, 96%, 97%, 98%, 99%, or 100% identical to the amino acid sequence of the catalytic domain of SEQ ID NO: 95. In some embodiments, the amino acid sequence of the effector domain comprises an amino acid sequence at least 80%, 81%, 82%, 83%, 84%, 85%, 86%, 87%, 88%, 89%, 90%, 91%, 92%, 93%, 94%, 95%, 96%, 97%, 98%, 99%, or 100% identical to the amino acid sequence of the catalytic domain of SEQ ID NO: 96. In some embodiments, the amino acid sequence of the effector domain comprises an amino acid sequence at least 80%, 81%, 82%, 83%, 84%, 85%, 86%, 87%, 88%, 89%, 90%, 91%, 92%, 93%, 94%, 95%, 96%, 97%, 98%, 99%, or 100% identical to the amino acid sequence of the catalytic domain of SEQ ID NO: 97. In some embodiments, the amino acid sequence of the effector domain comprises an amino acid sequence at least 80%, 81%, 82%, 83%, 84%, 85%, 86%, 87%, 88%, 89%, 90%, 91%, 92%, 93%, 94%, 95%, 96%, 97%, 98%, 99%, or 100% identical to the amino acid sequence of the catalytic domain of SEQ ID NO: 98. In some embodiments, the amino acid sequence of the effector domain comprises an amino acid sequence at least 80%, 81%, 82%, 83%, 84%, 85%, 86%, 87%, 88%, 89%, 90%, 91%, 92%, 93%, 94%, 95%, 96%, 97%, 98%, 99%, or 100% identical to the amino acid sequence of the catalytic domain of SEQ ID NO: 99. In some embodiments, the amino acid sequence of the effector domain comprises an amino acid sequence at least 80%, 81%, 82%, 83%, 84%, 85%, 86%, 87%, 88%, 89%, 90%, 91%, 92%, 93%, 94%, 95%, 96%, 97%, 98%, 99%, or 100% identical to the amino acid sequence of the catalytic domain of SEQ ID NO: 100. In some embodiments, the amino acid sequence of the effector domain comprises an amino acid sequence at least 80%, 81%, 82%, 83%, 84%, 85%, 86%, 87%, 88%, 89%, 90%, 91%, 92%, 93%, 94%, 95%, 96%, 97%, 98%, 99%, or 100% identical to the amino acid sequence of the catalytic domain of SEQ ID NO: 101. In some embodiments, the amino acid sequence of the effector domain comprises an amino acid sequence at least 80%, 81%, 82%, 83%, 84%, 85%, 86%, 87%, 88%, 89%, 90%, 91%, 92%, 93%, 94%, 95%, 96%, 97%, 98%, 99%, or 100% identical to the amino acid sequence of the catalytic domain of SEQ ID NO: 102. In some embodiments, the amino acid sequence of the effector domain comprises an amino acid sequence at least 80%, 81%, 82%, 83%, 84%, 85%, 86%, 87%, 88%, 89%, 90%, 91%, 92%, 93%, 94%, 95%, 96%, 97%, 98%, 99%, or 100% identical to the amino acid sequence of the catalytic domain of SEQ ID NO: 103. In some embodiments, the amino acid sequence of the effector domain comprises an amino acid sequence at least 80%, 81%, 82%, 83%, 84%, 85%, 86%, 87%, 88%, 89%, 90%, 91%, 92%, 93%, 94%, 95%, 96%, 97%, 98%, 99%, or 100% identical to the amino acid sequence of the catalytic domain of SEQ ID NO: 104. In some embodiments, the amino acid sequence of the effector domain comprises an amino acid sequence at least 80%, 81%, 82%, 83%, 84%, 85%, 86%, 87%, 88%, 89%, 90%, 91%, 92%, 93%, 94%, 95%, 96%, 97%, 98%, 99%, or 100% identical to the amino acid sequence of the catalytic domain of SEQ ID NO: 105. In some embodiments, the amino acid sequence of the effector domain comprises an amino acid sequence at least 80%, 81%, 82%, 83%, 84%, 85%, 86%, 87%, 88%, 89%, 90%, 91%, 92%, 93%, 94%, 95%, 96%, 97%, 98%, 99%, or 100% identical to the amino acid sequence of the catalytic domain of SEQ ID NO: 106. In some embodiments, the amino acid sequence of the effector domain comprises an amino acid sequence at least 80%, 81%, 82%, 83%, 84%, 85%, 86%, 87%, 88%, 89%, 90%, 91%, 92%, 93%, 94%, 95%, 96%, 97%, 98%, 99%, or 100% identical to the amino acid sequence of the catalytic domain of SEQ ID NO: 107. In some embodiments, the amino acid sequence of the effector domain comprises an amino acid sequence at least 80%, 81%, 82%, 83%, 84%, 85%, 86%, 87%, 88%, 89%, 90%, 91%, 92%, 93%, 94%, 95%, 96%, 97%, 98%, 99%, or 100% identical to the amino acid sequence of the catalytic domain of SEQ ID NO: 108. In some embodiments, the amino acid sequence of the effector domain comprises an amino acid sequence at least 80%, 81%, 82%, 83%, 84%, 85%, 86%, 87%, 88%, 89%, 90%, 91%, 92%, 93%, 94%, 95%, 96%, 97%, 98%, 99%, or 100% identical to the amino acid sequence of the catalytic domain of SEQ ID NO: 109. In some embodiments, the amino acid sequence of the effector domain comprises an amino acid sequence at least 80%, 81%, 82%, 83%, 84%, 85%, 86%, 87%, 88%, 89%, 90%, 91%, 92%, 93%, 94%, 95%, 96%, 97%, 98%, 99%, or 100% identical to the amino acid sequence of the catalytic domain of SEQ ID NO: 110. In some embodiments, the amino acid sequence of the effector domain comprises an amino acid sequence at least 80%, 81%, 82%, 83%, 84%, 85%, 86%, 87%, 88%, 89%, 90%, 91%, 92%, 93%, 94%, 95%, 96%, 97%, 98%, 99%, or 100% identical to the amino acid sequence of the catalytic domain of SEQ ID NO: 111. In some embodiments, the amino acid sequence of the effector domain comprises an amino acid sequence at least 80%, 81%, 82%, 83%, 84%, 85%, 86%, 87%, 88%, 89%, 90%, 91%, 92%, 93%, 94%, 95%, 96%, 97%, 98%, 99%, or 100% identical to the amino acid sequence of the catalytic domain of SEQ ID NO: 112.

[0145] In some embodiments, the catalytic domain is derived from a deubiquitinase that comprises an amino acid sequence at least 80%, 81%, 82%, 83%, 84%, 85%, 86%, 87%, 88%, 89%, 90%, 91%, 92%, 93%, 94%, 95%, 96%, 97%, 98%, 99%, or 100% identical to the amino acid sequence of any one of SEQ ID NOS: 1-112. In some embodiments, the catalytic domain is derived from a deubiquitinase that consists of an amino acid sequence at least 80%, 81%, 82%, 83%, 84%, 85%, 86%, 87%, 88%, 89%, 90%, 91%, 92%, 93%, 94%, 95%, 96%, 97%, 98%, 99%, or 100% identical to the amino acid sequence of any one of SEQ ID NOS: 1-112.

[0146] In some embodiments, the catalytic domain is derived from a deubiquitinase that consists of an amino acid sequence at least 80%, 81%, 82%, 83%, 84%, 85%, 86%, 87%, 88%, 89%, 90%, 91%, 92%, 93%, 94%, 95%, 96%, 97%, 98%, 99%, or 100% identical to the amino acid sequence of SEQ ID NO: 1. In some embodiments, the catalytic domain is derived from a deubiquitinase that consists of an amino acid sequence at least 80%, 81%, 82%, 83%, 84%, 85%, 86%, 87%, 88%, 89%, 90%, 91%, 92%, 93%, 94%, 95%, 96%, 97%, 98%, 99%, or 100% identical to the amino acid sequence of SEQ ID NO: 2. In some embodiments, the catalytic domain is derived from a deubiquitinase that consists of an amino acid sequence at least 80%, 81%, 82%, 83%, 84%, 85%, 86%, 87%, 88%, 89%, 90%, 91%, 92%, 93%, 94%, 95%, 96%, 97%, 98%, 99%, or 100% identical to the amino acid sequence of SEQ ID NO: 3. In some embodiments, the catalytic domain is derived from a deubiquitinase that consists of an amino acid sequence at least 80%, 81%, 82%, 83%, 84%, 85%, 86%, 87%, 88%, 89%, 90%, 91%, 92%, 93%, 94%, 95%, 96%, 97%, 98%, 99%, or 100% identical to the amino acid sequence of SEQ ID NO: 4. In some embodiments, the catalytic domain is derived from a deubiquitinase that consists of an amino acid sequence at least 80%, 81%, 82%, 83%, 84%, 85%, 86%, 87%, 88%, 89%, 90%, 91%, 92%, 93%, 94%, 95%, 96%, 97%, 98%, 99%, or 100% identical to the amino acid sequence of SEQ ID NO: 5. In some embodiments, the catalytic domain is derived from a deubiquitinase that consists of an amino acid sequence at least 80%, 81%, 82%, 83%, 84%, 85%, 86%, 87%, 88%, 89%, 90%, 91%, 92%, 93%, 94%, 95%, 96%, 97%, 98%, 99%, or 100% identical to the amino acid sequence of SEQ ID NO: 6. In some embodiments, the catalytic domain is derived from a deubiquitinase that consists of an amino acid sequence at least 80%, 81%, 82%, 83%, 84%, 85%, 86%, 87%, 88%, 89%, 90%, 91%, 92%, 93%, 94%, 95%, 96%, 97%, 98%, 99%, or 100% identical to the amino acid sequence of SEQ ID NO: 7. In some embodiments, the catalytic domain is derived from a deubiquitinase that consists of an amino acid sequence at least 80%, 81%, 82%, 83%, 84%, 85%, 86%, 87%, 88%, 89%, 90%, 91%, 92%, 93%, 94%, 95%, 96%, 97%, 98%, 99%, or 100% identical to the amino acid sequence of SEQ ID NO: 8. In some embodiments, the catalytic domain is derived from a deubiquitinase that consists of an amino acid sequence at least 80%, 81%, 82%, 83%, 84%, 85%, 86%, 87%, 88%, 89%, 90%, 91%, 92%, 93%, 94%, 95%, 96%, 97%, 98%, 99%, or 100% identical to the amino acid sequence of SEQ ID NO: 9. In some embodiments, the catalytic domain is derived from a deubiquitinase that consists of an amino acid sequence at least 80%, 81%, 82%, 83%, 84%, 85%, 86%, 87%, 88%, 89%, 90%, 91%, 92%, 93%, 94%, 95%, 96%, 97%, 98%, 99%, or 100% identical to the amino acid sequence of SEQ ID NO: 10. In some embodiments, the catalytic domain is derived from a deubiquitinase that consists of an amino acid sequence at least 80%, 81%, 82%, 83%, 84%, 85%, 86%, 87%, 88%, 89%, 90%, 91%, 92%, 93%, 94%, 95%, 96%, 97%, 98%, 99%, or 100% identical to the amino acid sequence of SEQ ID NO: 11. In some embodiments, the catalytic domain is derived from a deubiquitinase that consists of an amino acid sequence at least 80%, 81%, 82%, 83%, 84%, 85%, 86%, 87%, 88%, 89%, 90%, 91%, 92%, 93%, 94%, 95%, 96%, 97%, 98%, 99%, or 100% identical to the amino acid sequence of SEQ ID NO: 12. In some embodiments, the catalytic domain is derived from a deubiquitinase that consists of an amino acid sequence at least 80%, 81%, 82%, 83%, 84%, 85%, 86%, 87%, 88%, 89%, 90%, 91%, 92%, 93%, 94%, 95%, 96%, 97%, 98%, 99%, or 100% identical to the amino acid sequence of SEQ ID NO: 13. In some embodiments, the catalytic domain is derived from a deubiquitinase that consists of an amino acid sequence at least 80%, 81%, 82%, 83%, 84%, 85%, 86%, 87%, 88%, 89%, 90%, 91%, 92%, 93%, 94%, 95%, 96%, 97%, 98%, 99%, or 100% identical to the amino acid sequence of SEQ ID NO: 14. In some embodiments, the catalytic domain is derived from a deubiquitinase that consists of an amino acid sequence at least 80%, 81%, 82%, 83%, 84%, 85%, 86%, 87%, 88%, 89%, 90%, 91%, 92%, 93%, 94%, 95%, 96%, 97%, 98%, 99%, or 100% identical to the amino acid sequence of SEQ ID NO: 15. In some embodiments, the catalytic domain is derived from a deubiquitinase that consists of an amino acid sequence at least 80%, 81%, 82%, 83%, 84%, 85%, 86%, 87%, 88%, 89%, 90%, 91%, 92%, 93%, 94%, 95%, 96%, 97%, 98%, 99%, or 100% identical to the amino acid sequence of SEQ ID NO: 16. In some embodiments, the catalytic domain is derived from a deubiquitinase that consists of an amino acid sequence at least 80%, 81%, 82%, 83%, 84%, 85%, 86%, 87%, 88%, 89%, 90%, 91%, 92%, 93%, 94%, 95%, 96%, 97%, 98%, 99%, or 100% identical to the amino acid sequence of SEQ ID NO: 17. In some embodiments, the catalytic domain is derived from a deubiquitinase that consists of an amino acid sequence at least 80%, 81%, 82%, 83%, 84%, 85%, 86%, 87%, 88%, 89%, 90%, 91%, 92%, 93%, 94%, 95%, 96%, 97%, 98%, 99%, or 100% identical to the amino acid sequence of SEQ ID NO: 18. In some embodiments, the catalytic domain is derived from a deubiquitinase that consists of an amino acid sequence at least 80%, 81%, 82%, 83%, 84%, 85%, 86%, 87%, 88%, 89%, 90%, 91%, 92%, 93%, 94%, 95%, 96%, 97%, 98%, 99%, or 100% identical to the amino acid sequence of SEQ ID NO: 19. In some embodiments, the catalytic domain is derived from a deubiquitinase that consists of an amino acid sequence at least 80%, 81%, 82%, 83%, 84%, 85%, 86%, 87%, 88%, 89%, 90%, 91%, 92%, 93%, 94%, 95%, 96%, 97%, 98%, 99%, or 100% identical to the amino acid sequence of SEQ ID NO: 20. In some embodiments, the catalytic domain is derived from a deubiquitinase that consists of an amino acid sequence at least 80%, 81%, 82%, 83%, 84%, 85%, 86%, 87%, 88%, 89%, 90%, 91%, 92%, 93%, 94%, 95%, 96%, 97%, 98%, 99%, or 100% identical to the amino acid sequence of SEQ ID NO: 21. In some embodiments, the catalytic domain is derived from a deubiquitinase that consists of an amino acid sequence at least 80%, 81%, 82%, 83%, 84%, 85%, 86%, 87%, 88%, 89%, 90%, 91%, 92%, 93%, 94%, 95%, 96%, 97%, 98%, 99%, or 100% identical to the amino acid sequence of SEQ ID NO: 22. In some embodiments, the catalytic domain is derived from a deubiquitinase that consists of an amino acid sequence at least 80%, 81%, 82%, 83%, 84%, 85%, 86%, 87%, 88%, 89%, 90%, 91%, 92%, 93%, 94%, 95%, 96%, 97%, 98%, 99%, or 100% identical to the amino acid sequence of SEQ ID NO: 23. In some embodiments, the catalytic domain is derived from a deubiquitinase that consists of an amino acid sequence at least 80%, 81%, 82%, 83%, 84%, 85%, 86%, 87%, 88%, 89%, 90%, 91%, 92%, 93%, 94%, 95%, 96%, 97%, 98%, 99%, or 100% identical to the amino acid sequence of SEQ ID NO: 24. In some embodiments, the catalytic domain is derived from a deubiquitinase that consists of an amino acid sequence at least 80%, 81%, 82%, 83%, 84%, 85%, 86%, 87%, 88%, 89%, 90%, 91%, 92%, 93%, 94%, 95%, 96%, 97%, 98%, 99%, or 100% identical to the amino acid sequence of SEQ ID NO: 25. In some embodiments, the catalytic domain is derived from a deubiquitinase that consists of an amino acid sequence at least 80%, 81%, 82%, 83%, 84%, 85%, 86%, 87%, 88%, 89%, 90%, 91%, 92%, 93%, 94%, 95%, 96%, 97%, 98%, 99%, or 100% identical to the amino acid sequence of SEQ ID NO: 26. In some embodiments, the catalytic domain is derived from a deubiquitinase that consists of an amino acid sequence at least 80%, 81%, 82%, 83%, 84%, 85%, 86%, 87%, 88%, 89%, 90%, 91%, 92%, 93%, 94%, 95%, 96%, 97%, 98%, 99%, or 100% identical to the amino acid sequence of SEQ ID NO: 27. In some embodiments, the catalytic domain is derived from a deubiquitinase that consists of an amino acid sequence at least 80%, 81%, 82%, 83%, 84%, 85%, 86%, 87%, 88%, 89%, 90%, 91%, 92%, 93%, 94%, 95%, 96%, 97%, 98%, 99%, or 100% identical to the amino acid sequence of SEQ ID NO: 28. In some embodiments, the catalytic domain is derived from a deubiquitinase that consists of an amino acid sequence at least 80%, 81%, 82%, 83%, 84%, 85%, 86%, 87%, 88%, 89%, 90%, 91%, 92%, 93%, 94%, 95%, 96%, 97%, 98%, 99%, or 100% identical to the amino acid sequence of SEQ ID NO: 29. In some embodiments, the catalytic domain is derived from a deubiquitinase that consists of an amino acid sequence at least 80%, 81%, 82%, 83%, 84%, 85%, 86%, 87%, 88%, 89%, 90%, 91%, 92%, 93%, 94%, 95%, 96%, 97%, 98%, 99%, or 100% identical to the amino acid sequence of SEQ ID NO: 30. In some embodiments, the catalytic domain is derived from a deubiquitinase that consists of an amino acid sequence at least 80%, 81%, 82%, 83%, 84%, 85%, 86%, 87%, 88%, 89%, 90%, 91%, 92%, 93%, 94%, 95%, 96%, 97%, 98%, 99%, or 100% identical to the amino acid sequence of SEQ ID NO: 31. In some embodiments, the catalytic domain is derived from a deubiquitinase that consists of an amino acid sequence at least 80%, 81%, 82%, 83%, 84%, 85%, 86%, 87%, 88%, 89%, 90%, 91%, 92%, 93%, 94%, 95%, 96%, 97%, 98%, 99%, or 100% identical to the amino acid sequence of SEQ ID NO: 32. In some embodiments, the catalytic domain is derived from a deubiquitinase that consists of an amino acid sequence at least 80%, 81%, 82%, 83%, 84%, 85%, 86%, 87%, 88%, 89%, 90%, 91%, 92%, 93%, 94%, 95%, 96%, 97%, 98%, 99%, or 100% identical to the amino acid sequence of SEQ ID NO: 33. In some embodiments, the catalytic domain is derived from a deubiquitinase that consists of an amino acid sequence at least 80%, 81%, 82%, 83%, 84%, 85%, 86%, 87%, 88%, 89%, 90%, 91%, 92%, 93%, 94%, 95%, 96%, 97%, 98%, 99%, or 100% identical to the amino acid sequence of SEQ ID NO: 34. In some embodiments, the catalytic domain is derived from a deubiquitinase that consists of an amino acid sequence at least 80%, 81%, 82%, 83%, 84%, 85%, 86%, 87%, 88%, 89%, 90%, 91%, 92%, 93%, 94%, 95%, 96%, 97%, 98%, 99%, or 100% identical to the amino acid sequence of SEQ ID NO: 35. In some embodiments, the catalytic domain is derived from a deubiquitinase that consists of an amino acid sequence at least 80%, 81%, 82%, 83%, 84%, 85%, 86%, 87%, 88%, 89%, 90%, 91%, 92%, 93%, 94%, 95%, 96%, 97%, 98%, 99%, or 100% identical to the amino acid sequence of SEQ ID NO: 36. In some embodiments, the catalytic domain is derived from a deubiquitinase that consists of an amino acid sequence at least 80%, 81%, 82%, 83%, 84%, 85%, 86%, 87%, 88%, 89%, 90%, 91%, 92%, 93%, 94%, 95%, 96%, 97%, 98%, 99%, or 100% identical to the amino acid sequence of SEQ ID NO: 37. In some embodiments, the catalytic domain is derived from a deubiquitinase that consists of an amino acid sequence at least 80%, 81%, 82%, 83%, 84%, 85%, 86%, 87%, 88%, 89%, 90%, 91%, 92%, 93%, 94%, 95%, 96%, 97%, 98%, 99%, or 100% identical to the amino acid sequence of SEQ ID NO: 38. In some embodiments, the catalytic domain is derived from a deubiquitinase that consists of an amino acid sequence at least 80%, 81%, 82%, 83%, 84%, 85%, 86%, 87%, 88%, 89%, 90%, 91%, 92%, 93%, 94%, 95%, 96%, 97%, 98%, 99%, or 100% identical to the amino acid sequence of SEQ ID NO: 39. In some embodiments, the catalytic domain is derived from a deubiquitinase that consists of an amino acid sequence at least 80%, 81%, 82%, 83%, 84%, 85%, 86%, 87%, 88%, 89%, 90%, 91%, 92%, 93%, 94%, 95%, 96%, 97%, 98%, 99%, or 100% identical to the amino acid sequence of SEQ ID NO: 40. In some embodiments, the catalytic domain is derived from a deubiquitinase that consists of an amino acid sequence at least 80%, 81%, 82%, 83%, 84%, 85%, 86%, 87%, 88%, 89%, 90%, 91%, 92%, 93%, 94%, 95%, 96%, 97%, 98%, 99%, or 100% identical to the amino acid sequence of SEQ ID NO: 41. In some embodiments, the catalytic domain is derived from a deubiquitinase that consists of an amino acid sequence at least 80%, 81%, 82%, 83%, 84%, 85%, 86%, 87%, 88%, 89%, 90%, 91%, 92%, 93%, 94%, 95%, 96%, 97%, 98%, 99%, or 100% identical to the amino acid sequence of SEQ ID NO: 42. In some embodiments, the catalytic domain is derived from a deubiquitinase that consists of an amino acid sequence at least 80%, 81%, 82%, 83%, 84%, 85%, 86%, 87%, 88%, 89%, 90%, 91%, 92%, 93%, 94%, 95%, 96%, 97%, 98%, 99%, or 100% identical to the amino acid sequence of SEQ ID NO: 43. In some embodiments, the catalytic domain is derived from a deubiquitinase that consists of an amino acid sequence at least 80%, 81%, 82%, 83%, 84%, 85%, 86%, 87%, 88%, 89%, 90%, 91%, 92%, 93%, 94%, 95%, 96%, 97%, 98%, 99%, or 100% identical to the amino acid sequence of SEQ ID NO: 44. In some embodiments, the catalytic domain is derived from a deubiquitinase that consists of an amino acid sequence at least 80%, 81%, 82%, 83%, 84%, 85%, 86%, 87%, 88%, 89%, 90%, 91%, 92%, 93%, 94%, 95%, 96%, 97%, 98%, 99%, or 100% identical to the amino acid sequence of SEQ ID NO: 45. In some embodiments, the catalytic domain is derived from a deubiquitinase that consists of an amino acid sequence at least 80%, 81%, 82%, 83%, 84%, 85%, 86%, 87%, 88%, 89%, 90%, 91%, 92%, 93%, 94%, 95%, 96%, 97%, 98%, 99%, or 100% identical to the amino acid sequence of SEQ ID NO: 46. In some embodiments, the catalytic domain is derived from a deubiquitinase that consists of an amino acid sequence at least 80%, 81%, 82%, 83%, 84%, 85%, 86%, 87%, 88%, 89%, 90%, 91%, 92%, 93%, 94%, 95%, 96%, 97%, 98%, 99%, or 100% identical to the amino acid sequence of SEQ ID NO: 47. In some embodiments, the catalytic domain is derived from a deubiquitinase that consists of an amino acid sequence at least 80%, 81%, 82%, 83%, 84%, 85%, 86%, 87%, 88%, 89%, 90%, 91%, 92%, 93%, 94%, 95%, 96%, 97%, 98%, 99%, or 100% identical to the amino acid sequence of SEQ ID NO: 48. In some embodiments, the catalytic domain is derived from a deubiquitinase that consists of an amino acid sequence at least 80%, 81%, 82%, 83%, 84%, 85%, 86%, 87%, 88%, 89%, 90%, 91%, 92%, 93%, 94%, 95%, 96%, 97%, 98%, 99%, or 100% identical to the amino acid sequence of SEQ ID NO: 49. In some embodiments, the catalytic domain is derived from a deubiquitinase that consists of an amino acid sequence at least 80%, 81%, 82%, 83%, 84%, 85%, 86%, 87%, 88%, 89%, 90%, 91%, 92%, 93%, 94%, 95%, 96%, 97%, 98%, 99%, or 100% identical to the amino acid sequence of SEQ ID NO: 50. In some embodiments, the catalytic domain is derived from a deubiquitinase that consists of an amino acid sequence at least 80%, 81%, 82%, 83%, 84%, 85%, 86%, 87%, 88%, 89%, 90%, 91%, 92%, 93%, 94%, 95%, 96%, 97%, 98%, 99%, or 100% identical to the amino acid sequence of SEQ ID NO: 51. In some embodiments, the catalytic domain is derived from a deubiquitinase that consists of an amino acid sequence at least 80%, 81%, 82%, 83%, 84%, 85%, 86%, 87%, 88%, 89%, 90%, 91%, 92%, 93%, 94%, 95%, 96%, 97%, 98%, 99%, or 100% identical to the amino acid sequence of SEQ ID NO: 52. In some embodiments, the catalytic domain is derived from a deubiquitinase that consists of an amino acid sequence at least 80%, 81%, 82%, 83%, 84%, 85%, 86%, 87%, 88%, 89%, 90%, 91%, 92%, 93%, 94%, 95%, 96%, 97%, 98%, 99%, or 100% identical to the amino acid sequence of SEQ ID NO: 53. In some embodiments, the catalytic domain is derived from a deubiquitinase that consists of an amino acid sequence at least 80%, 81%, 82%, 83%, 84%, 85%, 86%, 87%, 88%, 89%, 90%, 91%, 92%, 93%, 94%, 95%, 96%, 97%, 98%, 99%, or 100% identical to the amino acid sequence of SEQ ID NO: 54. In some embodiments, the catalytic domain is derived from a deubiquitinase that consists of an amino acid sequence at least 80%, 81%, 82%, 83%, 84%, 85%, 86%, 87%, 88%, 89%, 90%, 91%, 92%, 93%, 94%, 95%, 96%, 97%, 98%, 99%, or 100% identical to the amino acid sequence of SEQ ID NO: 55. In some embodiments, the catalytic domain is derived from a deubiquitinase that consists of an amino acid sequence at least 80%, 81%, 82%, 83%, 84%, 85%, 86%, 87%, 88%, 89%, 90%, 91%, 92%, 93%, 94%, 95%, 96%, 97%, 98%, 99%, or 100% identical to the amino acid sequence of SEQ ID NO: 56. In some embodiments, the catalytic domain is derived from a deubiquitinase that consists of an amino acid sequence at least 80%, 81%, 82%, 83%, 84%, 85%, 86%, 87%, 88%, 89%, 90%, 91%, 92%, 93%, 94%, 95%, 96%, 97%, 98%, 99%, or 100% identical to the amino acid sequence of SEQ ID NO: 57. In some embodiments, the catalytic domain is derived from a deubiquitinase that consists of an amino acid sequence at least 80%, 81%, 82%, 83%, 84%, 85%, 86%, 87%, 88%, 89%, 90%, 91%, 92%, 93%, 94%, 95%, 96%, 97%, 98%, 99%, or 100% identical to the amino acid sequence of SEQ ID NO: 58. In some embodiments, the catalytic domain is derived from a deubiquitinase that consists of an amino acid sequence at least 80%, 81%, 82%, 83%, 84%, 85%, 86%, 87%, 88%, 89%, 90%, 91%, 92%, 93%, 94%, 95%, 96%, 97%, 98%, 99%, or 100% identical to the amino acid sequence of SEQ ID NO: 59. In some embodiments, the catalytic domain is derived from a deubiquitinase that consists of an amino acid sequence at least 80%, 81%, 82%, 83%, 84%, 85%, 86%, 87%, 88%, 89%, 90%, 91%, 92%, 93%, 94%, 95%, 96%, 97%, 98%, 99%, or 100% identical to the amino acid sequence of SEQ ID NO: 60. In some embodiments, the catalytic domain is derived from a deubiquitinase that consists of an amino acid sequence at least 80%, 81%, 82%, 83%, 84%, 85%, 86%, 87%, 88%, 89%, 90%, 91%, 92%, 93%, 94%, 95%, 96%, 97%, 98%, 99%, or 100% identical to the amino acid sequence of SEQ ID NO: 61. In some embodiments, the catalytic domain is derived from a deubiquitinase that consists of an amino acid sequence at least 80%, 81%, 82%, 83%, 84%, 85%, 86%, 87%, 88%, 89%, 90%, 91%, 92%, 93%, 94%, 95%, 96%, 97%, 98%, 99%, or 100% identical to the amino acid sequence of SEQ ID NO: 62. In some embodiments, the catalytic domain is derived from a deubiquitinase that consists of an amino acid sequence at least 80%, 81%, 82%, 83%, 84%, 85%, 86%, 87%, 88%, 89%, 90%, 91%, 92%, 93%, 94%, 95%, 96%, 97%, 98%, 99%, or 100% identical to the amino acid sequence of SEQ ID NO: 63. In some embodiments, the catalytic domain is derived from a deubiquitinase that consists of an amino acid sequence at least 80%, 81%, 82%, 83%, 84%, 85%, 86%, 87%, 88%, 89%, 90%, 91%, 92%, 93%, 94%, 95%, 96%, 97%, 98%, 99%, or 100% identical to the amino acid sequence of SEQ ID NO: 64. In some embodiments, the catalytic domain is derived from a deubiquitinase that consists of an amino acid sequence at least 80%, 81%, 82%, 83%, 84%, 85%, 86%, 87%, 88%, 89%, 90%, 91%, 92%, 93%, 94%, 95%, 96%, 97%, 98%, 99%, or 100% identical to the amino acid sequence of SEQ ID NO: 65. In some embodiments, the catalytic domain is derived from a deubiquitinase that consists of an amino acid sequence at least 80%, 81%, 82%, 83%, 84%, 85%, 86%, 87%, 88%, 89%, 90%, 91%, 92%, 93%, 94%, 95%, 96%, 97%, 98%, 99%, or 100% identical to the amino acid sequence of SEQ ID NO: 66. In some embodiments, the catalytic domain is derived from a deubiquitinase that consists of an amino acid sequence at least 80%, 81%, 82%, 83%, 84%, 85%, 86%, 87%, 88%, 89%, 90%, 91%, 92%, 93%, 94%, 95%, 96%, 97%, 98%, 99%, or 100% identical to the amino acid sequence of SEQ ID NO: 67. In some embodiments, the catalytic domain is derived from a deubiquitinase that consists of an amino acid sequence at least 80%, 81%, 82%, 83%, 84%, 85%, 86%, 87%, 88%, 89%, 90%, 91%, 92%, 93%, 94%, 95%, 96%, 97%, 98%, 99%, or 100% identical to the amino acid sequence of SEQ ID NO: 68. In some embodiments, the catalytic domain is derived from a deubiquitinase that consists of an amino acid sequence at least 80%, 81%, 82%, 83%, 84%, 85%, 86%, 87%, 88%, 89%, 90%, 91%, 92%, 93%, 94%, 95%, 96%, 97%, 98%, 99%, or 100% identical to the amino acid sequence of SEQ ID NO: 69. In some embodiments, the catalytic domain is derived from a deubiquitinase that consists of an amino acid sequence at least 80%, 81%, 82%, 83%, 84%, 85%, 86%, 87%, 88%, 89%, 90%, 91%, 92%, 93%, 94%, 95%, 96%, 97%, 98%, 99%, or 100% identical to the amino acid sequence of SEQ ID NO: 70. In some embodiments, the catalytic domain is derived from a deubiquitinase that consists of an amino acid sequence at least 80%, 81%, 82%, 83%, 84%, 85%, 86%, 87%, 88%, 89%, 90%, 91%, 92%, 93%, 94%, 95%, 96%, 97%, 98%, 99%, or 100% identical to the amino acid sequence of SEQ ID NO: 71. In some embodiments, the catalytic domain is derived from a deubiquitinase that consists of an amino acid sequence at least 80%, 81%, 82%, 83%, 84%, 85%, 86%, 87%, 88%, 89%, 90%, 91%, 92%, 93%, 94%, 95%, 96%, 97%, 98%, 99%, or 100% identical to the amino acid sequence of SEQ ID NO: 72. In some embodiments, the catalytic domain is derived from a deubiquitinase that consists of an amino acid sequence at least 80%, 81%, 82%, 83%, 84%, 85%, 86%, 87%, 88%, 89%, 90%, 91%, 92%, 93%, 94%, 95%, 96%, 97%, 98%, 99%, or 100% identical to the amino acid sequence of SEQ ID NO: 73. In some embodiments, the catalytic domain is derived from a deubiquitinase that consists of an amino acid sequence at least 80%, 81%, 82%, 83%, 84%, 85%, 86%, 87%, 88%, 89%, 90%, 91%, 92%, 93%, 94%, 95%, 96%, 97%, 98%, 99%, or 100% identical to the amino acid sequence of SEQ ID NO: 74. In some embodiments, the catalytic domain is derived from a deubiquitinase that consists of an amino acid sequence at least 80%, 81%, 82%, 83%, 84%, 85%, 86%, 87%, 88%, 89%, 90%, 91%, 92%, 93%, 94%, 95%, 96%, 97%, 98%, 99%, or 100% identical to the amino acid sequence of SEQ ID NO: 75. In some embodiments, the catalytic domain is derived from a deubiquitinase that consists of an amino acid sequence at least 80%, 81%, 82%, 83%, 84%, 85%, 86%, 87%, 88%, 89%, 90%, 91%, 92%, 93%, 94%, 95%, 96%, 97%, 98%, 99%, or 100% identical to the amino acid sequence of SEQ ID NO: 76. In some embodiments, the catalytic domain is derived from a deubiquitinase that consists of an amino acid sequence at least 80%, 81%, 82%, 83%, 84%, 85%, 86%, 87%, 88%, 89%, 90%, 91%, 92%, 93%, 94%, 95%, 96%, 97%, 98%, 99%, or 100% identical to the amino acid sequence of SEQ ID NO: 77. In some embodiments, the catalytic domain is derived from a deubiquitinase that consists of an amino acid sequence at least 80%, 81%, 82%, 83%, 84%, 85%, 86%, 87%, 88%, 89%, 90%, 91%, 92%, 93%, 94%, 95%, 96%, 97%, 98%, 99%, or 100% identical to the amino acid sequence of SEQ ID NO: 78. In some embodiments, the catalytic domain is derived from a deubiquitinase that consists of an amino acid sequence at least 80%, 81%, 82%, 83%, 84%, 85%, 86%, 87%, 88%, 89%, 90%, 91%, 92%, 93%, 94%, 95%, 96%, 97%, 98%, 99%, or 100% identical to the amino acid sequence of SEQ ID NO: 79. In some embodiments, the catalytic domain is derived from a deubiquitinase that consists of an amino acid sequence at least 80%, 81%, 82%, 83%, 84%, 85%, 86%, 87%, 88%, 89%, 90%, 91%, 92%, 93%, 94%, 95%, 96%, 97%, 98%, 99%, or 100% identical to the amino acid sequence of SEQ ID NO: 80. In some embodiments, the catalytic domain is derived from a deubiquitinase that consists of an amino acid sequence at least 80%, 81%, 82%, 83%, 84%, 85%, 86%, 87%, 88%, 89%, 90%, 91%, 92%, 93%, 94%, 95%, 96%, 97%, 98%, 99%, or 100% identical to the amino acid sequence of SEQ ID NO: 81. In some embodiments, the catalytic domain is derived from a deubiquitinase that consists of an amino acid sequence at least 80%, 81%, 82%, 83%, 84%, 85%, 86%, 87%, 88%, 89%, 90%, 91%, 92%, 93%, 94%, 95%, 96%, 97%, 98%, 99%, or 100% identical to the amino acid sequence of SEQ ID NO: 82. In some embodiments, the catalytic domain is derived from a deubiquitinase that consists of an amino acid sequence at least 80%, 81%, 82%, 83%, 84%, 85%, 86%, 87%, 88%, 89%, 90%, 91%, 92%, 93%, 94%, 95%, 96%, 97%, 98%, 99%, or 100% identical to the amino acid sequence of SEQ ID NO: 83. In some embodiments, the catalytic domain is derived from a deubiquitinase that consists of an amino acid sequence at least 80%, 81%, 82%, 83%, 84%, 85%, 86%, 87%, 88%, 89%, 90%, 91%, 92%, 93%, 94%, 95%, 96%, 97%, 98%, 99%, or 100% identical to the amino acid sequence of SEQ ID NO: 84. In some embodiments, the catalytic domain is derived from a deubiquitinase that consists of an amino acid sequence at least 80%, 81%, 82%, 83%, 84%, 85%, 86%, 87%, 88%, 89%, 90%, 91%, 92%, 93%, 94%, 95%, 96%, 97%, 98%, 99%, or 100% identical to the amino acid sequence of SEQ ID NO: 85. In some embodiments, the catalytic domain is derived from a deubiquitinase that consists of an amino acid sequence at least 80%, 81%, 82%, 83%, 84%, 85%, 86%, 87%, 88%, 89%, 90%, 91%, 92%, 93%, 94%, 95%, 96%, 97%, 98%, 99%, or 100% identical to the amino acid sequence of SEQ ID NO: 86. In some embodiments, the catalytic domain is derived from a deubiquitinase that consists of an amino acid sequence at least 80%, 81%, 82%, 83%, 84%, 85%, 86%, 87%, 88%, 89%, 90%, 91%, 92%, 93%, 94%, 95%, 96%, 97%, 98%, 99%, or 100% identical to the amino acid sequence of SEQ ID NO: 87. In some embodiments, the catalytic domain is derived from a deubiquitinase that consists of an amino acid sequence at least 80%, 81%, 82%, 83%, 84%, 85%, 86%, 87%, 88%, 89%, 90%, 91%, 92%, 93%, 94%, 95%, 96%, 97%, 98%, 99%, or 100% identical to the amino acid sequence of SEQ ID NO: 88. In some embodiments, the catalytic domain is derived from a deubiquitinase that consists of an amino acid sequence at least 80%, 81%, 82%, 83%, 84%, 85%, 86%, 87%, 88%, 89%, 90%, 91%, 92%, 93%, 94%, 95%, 96%, 97%, 98%, 99%, or 100% identical to the amino acid sequence of SEQ ID NO: 89. In some embodiments, the catalytic domain is derived from a deubiquitinase that consists of an amino acid sequence at least 80%, 81%, 82%, 83%, 84%, 85%, 86%, 87%, 88%, 89%, 90%, 91%, 92%, 93%, 94%, 95%, 96%, 97%, 98%, 99%, or 100% identical to the amino acid sequence of SEQ ID NO: 90. In some embodiments, the catalytic domain is derived from a deubiquitinase that consists of an amino acid sequence at least 80%, 81%, 82%, 83%, 84%, 85%, 86%, 87%, 88%, 89%, 90%, 91%, 92%, 93%, 94%, 95%, 96%, 97%, 98%, 99%, or 100% identical to the amino acid sequence of SEQ ID NO: 91. In some embodiments, the catalytic domain is derived from a deubiquitinase that consists of an amino acid sequence at least 80%, 81%, 82%, 83%, 84%, 85%, 86%, 87%, 88%, 89%, 90%, 91%, 92%, 93%, 94%, 95%, 96%, 97%, 98%, 99%, or 100% identical to the amino acid sequence of SEQ ID NO: 92. In some embodiments, the catalytic domain is derived from a deubiquitinase that consists of an amino acid sequence at least 80%, 81%, 82%, 83%, 84%, 85%, 86%, 87%, 88%, 89%, 90%, 91%, 92%, 93%, 94%, 95%, 96%, 97%, 98%, 99%, or 100% identical to the amino acid sequence of SEQ ID NO: 93. In some embodiments, the catalytic domain is derived from a deubiquitinase that consists of an amino acid sequence at least 80%, 81%, 82%, 83%, 84%, 85%, 86%, 87%, 88%, 89%, 90%, 91%, 92%, 93%, 94%, 95%, 96%, 97%, 98%, 99%, or 100% identical to the amino acid sequence of SEQ ID NO: 94. In some embodiments, the catalytic domain is derived from a deubiquitinase that consists of an amino acid sequence at least 80%, 81%, 82%, 83%, 84%, 85%, 86%, 87%, 88%, 89%, 90%, 91%, 92%, 93%, 94%, 95%, 96%, 97%, 98%, 99%, or 100% identical to the amino acid sequence of SEQ ID NO: 95. In some embodiments, the catalytic domain is derived from a deubiquitinase that consists of an amino acid sequence at least 80%, 81%, 82%, 83%, 84%, 85%, 86%, 87%, 88%, 89%, 90%, 91%, 92%, 93%, 94%, 95%, 96%, 97%, 98%, 99%, or 100% identical to the amino acid sequence of SEQ ID NO: 96. In some embodiments, the catalytic domain is derived from a deubiquitinase that consists of an amino acid sequence at least 80%, 81%, 82%, 83%, 84%, 85%, 86%, 87%, 88%, 89%, 90%, 91%, 92%, 93%, 94%, 95%, 96%, 97%, 98%, 99%, or 100% identical to the amino acid sequence of SEQ ID NO: 97. In some embodiments, the catalytic domain is derived from a deubiquitinase that consists of an amino acid sequence at least 80%, 81%, 82%, 83%, 84%, 85%, 86%, 87%, 88%, 89%, 90%, 91%, 92%, 93%, 94%, 95%, 96%, 97%, 98%, 99%, or 100% identical to the amino acid sequence of SEQ ID NO: 98. In some embodiments, the catalytic domain is derived from a deubiquitinase that consists of an amino acid sequence at least 80%, 81%, 82%, 83%, 84%, 85%, 86%, 87%, 88%, 89%, 90%, 91%, 92%, 93%, 94%, 95%, 96%, 97%, 98%, 99%, or 100% identical to the amino acid sequence of SEQ ID NO: 99. In some embodiments, the catalytic domain is derived from a deubiquitinase that consists of an amino acid sequence at least 80%, 81%, 82%, 83%, 84%, 85%, 86%, 87%, 88%, 89%, 90%, 91%, 92%, 93%, 94%, 95%, 96%, 97%, 98%, 99%, or 100% identical to the amino acid sequence of SEQ ID NO: 100. In some embodiments, the catalytic domain is derived from a deubiquitinase that consists of an amino acid sequence at least 80%, 81%, 82%, 83%, 84%, 85%, 86%, 87%, 88%, 89%, 90%, 91%, 92%, 93%, 94%, 95%, 96%, 97%, 98%, 99%, or 100% identical to the amino acid sequence of SEQ ID NO: 101. In some embodiments, the catalytic domain is derived from a deubiquitinase that consists of an amino acid sequence at least 80%, 81%, 82%, 83%, 84%, 85%, 86%, 87%, 88%, 89%, 90%, 91%, 92%, 93%, 94%, 95%, 96%, 97%, 98%, 99%, or 100% identical to the amino acid sequence of SEQ ID NO: 102. In some embodiments, the catalytic domain is derived from a deubiquitinase that consists of an amino acid sequence at least 80%, 81%, 82%, 83%, 84%, 85%, 86%, 87%, 88%, 89%, 90%, 91%, 92%, 93%, 94%, 95%, 96%, 97%, 98%, 99%, or 100% identical to the amino acid sequence of SEQ ID NO: 102. In some embodiments, the catalytic domain is derived from a deubiquitinase that consists of an amino acid sequence at least 80%, 81%, 82%, 83%, 84%, 85%, 86%, 87%, 88%, 89%, 90%, 91%, 92%, 93%, 94%, 95%, 96%, 97%, 98%, 99%, or 100% identical to the amino acid sequence of SEQ ID NO: 104. In some embodiments, the catalytic domain is derived from a deubiquitinase that consists of an amino acid sequence at least 80%, 81%, 82%, 83%, 84%, 85%, 86%, 87%, 88%, 89%, 90%, 91%, 92%, 93%, 94%, 95%, 96%, 97%, 98%, 99%, or 100% identical to the amino acid sequence of SEQ ID NO: 105. In some embodiments, the catalytic domain is derived from a deubiquitinase that consists of an amino acid sequence at least 80%, 81%, 82%, 83%, 84%, 85%, 86%, 87%, 88%, 89%, 90%, 91%, 92%, 93%, 94%, 95%, 96%, 97%, 98%, 99%, or 100% identical to the amino acid sequence of SEQ ID NO: 106. In some embodiments, the catalytic domain is derived from a deubiquitinase that consists of an amino acid sequence at least 80%, 81%, 82%, 83%, 84%, 85%, 86%, 87%, 88%, 89%, 90%, 91%, 92%, 93%, 94%, 95%, 96%, 97%, 98%, 99%, or 100% identical to the amino acid sequence of SEQ ID NO: 107. In some embodiments, the catalytic domain is derived from a deubiquitinase that consists of an amino acid sequence at least 80%, 81%, 82%, 83%, 84%, 85%, 86%, 87%, 88%, 89%, 90%, 91%, 92%, 93%, 94%, 95%, 96%, 97%, 98%, 99%, or 100% identical to the amino acid sequence of SEQ ID NO: 108. In some embodiments, the catalytic domain is derived from a deubiquitinase that consists of an amino acid sequence at least 80%, 81%, 82%, 83%, 84%, 85%, 86%, 87%, 88%, 89%, 90%, 91%, 92%, 93%, 94%, 95%, 96%, 97%, 98%, 99%, or 100% identical to the amino acid sequence of SEQ ID NO: 109. In some embodiments, the catalytic domain is derived from a deubiquitinase that consists of an amino acid sequence at least 80%, 81%, 82%, 83%, 84%, 85%, 86%, 87%, 88%, 89%, 90%, 91%, 92%, 93%, 94%, 95%, 96%, 97%, 98%, 99%, or 100% identical to the amino acid sequence of SEQ ID NO: 110. In some embodiments, the catalytic domain is derived from a deubiquitinase that consists of an amino acid sequence at least 80%, 81%, 82%, 83%, 84%, 85%, 86%, 87%, 88%, 89%, 90%, 91%, 92%, 93%, 94%, 95%, 96%, 97%, 98%, 99%, or 100% identical to the amino acid sequence of SEQ ID NO: 111. In some embodiments, the catalytic domain is derived from a deubiquitinase that consists of an amino acid sequence at least 80%, 81%, 82%, 83%, 84%, 85%, 86%, 87%, 88%, 89%, 90%, 91%, 92%, 93%, 94%, 95%, 96%, 97%, 98%, 99%, or 100% identical to the amino acid sequence of SEQ ID NO: 112.

[0147] In some embodiments, the catalytic domain comprises an amino acid sequence at least 80%, 81%, 82%, 83%, 84%, 85%, 86%, 87%, 88%, 89%, 90%, 91%, 92%, 93%, 94%, 95%, 96%, 97%, 98%, 99%, or 100% identical to the amino acid sequence of any one of SEQ ID NOS: 113-220 or 270. In some embodiments, the catalytic domain consists of an amino acid sequence at least 80%, 81%, 82%, 83%, 84%, 85%, 86%, 87%, 88%, 89%, 90%, 91%, 92%, 93%, 94%, 95%, 96%, 97%, 98%, 99%, or 100% identical to the amino acid sequence of any one of SEQ ID NOS: 113-220.

[0148] In some embodiments, the catalytic domain comprises an amino acid sequence at least 80%, 81%, 82%, 83%, 84%, 85%, 86%, 87%, 88%, 89%, 90%, 91%, 92%, 93%, 94%, 95%, 96%, 97%, 98%, 99%, or 100% identical to the amino acid sequence of SEQ ID NO: 113. In some embodiments, the catalytic domain comprises an amino acid sequence at least 80%, 81%, 82%, 83%, 84%, 85%, 86%, 87%, 88%, 89%, 90%, 91%, 92%, 93%, 94%, 95%, 96%, 97%, 98%, 99%, or 100% identical to the amino acid sequence of SEQ ID NO: 114. In some embodiments, the catalytic domain comprises an amino acid sequence at least 80%, 81%, 82%, 83%, 84%, 85%, 86%, 87%, 88%, 89%, 90%, 91%, 92%, 93%, 94%, 95%, 96%, 97%, 98%, 99%, or 100% identical to the amino acid sequence of SEQ ID NO: 115. In some embodiments, the catalytic domain comprises an amino acid sequence at least 80%, 81%, 82%, 83%, 84%, 85%, 86%, 87%, 88%, 89%, 90%, 91%, 92%, 93%, 94%, 95%, 96%, 97%, 98%, 99%, or 100% identical to the amino acid sequence of SEQ ID NO: 116. In some embodiments, the catalytic domain comprises an amino acid sequence at least 80%, 81%, 82%, 83%, 84%, 85%, 86%, 87%, 88%, 89%, 90%, 91%, 92%, 93%, 94%, 95%, 96%, 97%, 98%, 99%, or 100% identical to the amino acid sequence of SEQ ID NO: 117. In some embodiments, the catalytic domain comprises an amino acid sequence at least 80%, 81%, 82%, 83%, 84%, 85%, 86%, 87%, 88%, 89%, 90%, 91%, 92%, 93%, 94%, 95%, 96%, 97%, 98%, 99%, or 100% identical to the amino acid sequence of SEQ ID NO: 118. In some embodiments, the catalytic domain comprises an amino acid sequence at least 80%, 81%, 82%, 83%, 84%, 85%, 86%, 87%, 88%, 89%, 90%, 91%, 92%, 93%, 94%, 95%, 96%, 97%, 98%, 99%, or 100% identical to the amino acid sequence of SEQ ID NO: 119. In some embodiments, the catalytic domain comprises an amino acid sequence at least 80%, 81%, 82%, 83%, 84%, 85%, 86%, 87%, 88%, 89%, 90%, 91%, 92%, 93%, 94%, 95%, 96%, 97%, 98%, 99%, or 100% identical to the amino acid sequence of SEQ ID NO: 120. In some embodiments, the catalytic domain comprises an amino acid sequence at least 80%, 81%, 82%, 83%, 84%, 85%, 86%, 87%, 88%, 89%, 90%, 91%, 92%, 93%, 94%, 95%, 96%, 97%, 98%, 99%, or 100% identical to the amino acid sequence of SEQ ID NO: 121. In some embodiments, the catalytic domain comprises an amino acid sequence at least 80%, 81%, 82%, 83%, 84%, 85%, 86%, 87%, 88%, 89%, 90%, 91%, 92%, 93%, 94%, 95%, 96%, 97%, 98%, 99%, or 100% identical to the amino acid sequence of SEQ ID NO: 122. In some embodiments, the catalytic domain comprises an amino acid sequence at least 80%, 81%, 82%, 83%, 84%, 85%, 86%, 87%, 88%, 89%, 90%, 91%, 92%, 93%, 94%, 95%, 96%, 97%, 98%, 99%, or 100% identical to the amino acid sequence of SEQ ID NO: 123. In some embodiments, the catalytic domain comprises an amino acid sequence at least 80%, 81%, 82%, 83%, 84%, 85%, 86%, 87%, 88%, 89%, 90%, 91%, 92%, 93%, 94%, 95%, 96%, 97%, 98%, 99%, or 100% identical to the amino acid sequence of SEQ ID NO: 124. In some embodiments, the catalytic domain comprises an amino acid sequence at least 80%, 81%, 82%, 83%, 84%, 85%, 86%, 87%, 88%, 89%, 90%, 91%, 92%, 93%, 94%, 95%, 96%, 97%, 98%, 99%, or 100% identical to the amino acid sequence of SEQ ID NO: 125. In some embodiments, the catalytic domain comprises an amino acid sequence at least 80%, 81%, 82%, 83%, 84%, 85%, 86%, 87%, 88%, 89%, 90%, 91%, 92%, 93%, 94%, 95%, 96%, 97%, 98%, 99%, or 100% identical to the amino acid sequence of SEQ ID NO: 126. In some embodiments, the catalytic domain comprises an amino acid sequence at least 80%, 81%, 82%, 83%, 84%, 85%, 86%, 87%, 88%, 89%, 90%, 91%, 92%, 93%, 94%, 95%, 96%, 97%, 98%, 99%, or 100% identical to the amino acid sequence of SEQ ID NO: 127. In some embodiments, the catalytic domain comprises an amino acid sequence at least 80%, 81%, 82%, 83%, 84%, 85%, 86%, 87%, 88%, 89%, 90%, 91%, 92%, 93%, 94%, 95%, 96%, 97%, 98%, 99%, or 100% identical to the amino acid sequence of SEQ ID NO: 128. In some embodiments, the catalytic domain comprises an amino acid sequence at least 80%, 81%, 82%, 83%, 84%, 85%, 86%, 87%, 88%, 89%, 90%, 91%, 92%, 93%, 94%, 95%, 96%, 97%, 98%, 99%, or 100% identical to the amino acid sequence of SEQ ID NO: 129. In some embodiments, the catalytic domain comprises an amino acid sequence at least 80%, 81%, 82%, 83%, 84%, 85%, 86%, 87%, 88%, 89%, 90%, 91%, 92%, 93%, 94%, 95%, 96%, 97%, 98%, 99%, or 100% identical to the amino acid sequence of SEQ ID NO: 130. In some embodiments, the catalytic domain comprises an amino acid sequence at least 80%, 81%, 82%, 83%, 84%, 85%, 86%, 87%, 88%, 89%, 90%, 91%, 92%, 93%, 94%, 95%, 96%, 97%, 98%, 99%, or 100% identical to the amino acid sequence of SEQ ID NO: 131. In some embodiments, the catalytic domain comprises an amino acid sequence at least 80%, 81%, 82%, 83%, 84%, 85%, 86%, 87%, 88%, 89%, 90%, 91%, 92%, 93%, 94%, 95%, 96%, 97%, 98%, 99%, or 100% identical to the amino acid sequence of SEQ ID NO: 132. In some embodiments, the catalytic domain comprises an amino acid sequence at least 80%, 81%, 82%, 83%, 84%, 85%, 86%, 87%, 88%, 89%, 90%, 91%, 92%, 93%, 94%, 95%, 96%, 97%, 98%, 99%, or 100% identical to the amino acid sequence of SEQ ID NO: 133. In some embodiments, the catalytic domain comprises an amino acid sequence at least 80%, 81%, 82%, 83%, 84%, 85%, 86%, 87%, 88%, 89%, 90%, 91%, 92%, 93%, 94%, 95%, 96%, 97%, 98%, 99%, or 100% identical to the amino acid sequence of SEQ ID NO: 134. In some embodiments, the catalytic domain comprises an amino acid sequence at least 80%, 81%, 82%, 83%, 84%, 85%, 86%, 87%, 88%, 89%, 90%, 91%, 92%, 93%, 94%, 95%, 96%, 97%, 98%, 99%, or 100% identical to the amino acid sequence of SEQ ID NO: 135. In some embodiments, the catalytic domain comprises an amino acid sequence at least 80%, 81%, 82%, 83%, 84%, 85%, 86%, 87%, 88%, 89%, 90%, 91%, 92%, 93%, 94%, 95%, 96%, 97%, 98%, 99%, or 100% identical to the amino acid sequence of SEQ ID NO: 136. In some embodiments, the catalytic domain comprises an amino acid sequence at least 80%, 81%, 82%, 83%, 84%, 85%, 86%, 87%, 88%, 89%, 90%, 91%, 92%, 93%, 94%, 95%, 96%, 97%, 98%, 99%, or 100% identical to the amino acid sequence of SEQ ID NO: 137. In some embodiments, the catalytic domain comprises an amino acid sequence at least 80%, 81%, 82%, 83%, 84%, 85%, 86%, 87%, 88%, 89%, 90%, 91%, 92%, 93%, 94%, 95%, 96%, 97%, 98%, 99%, or 100% identical to the amino acid sequence of SEQ ID NO: 138. In some embodiments, the catalytic domain comprises an amino acid sequence at least 80%, 81%, 82%, 83%, 84%, 85%, 86%, 87%, 88%, 89%, 90%, 91%, 92%, 93%, 94%, 95%, 96%, 97%, 98%, 99%, or 100% identical to the amino acid sequence of SEQ ID NO: 139. In some embodiments, the catalytic domain comprises an amino acid sequence at least 80%, 81%, 82%, 83%, 84%, 85%, 86%, 87%, 88%, 89%, 90%, 91%, 92%, 93%, 94%, 95%, 96%, 97%, 98%, 99%, or 100% identical to the amino acid sequence of SEQ ID NO: 140. In some embodiments, the catalytic domain comprises an amino acid sequence at least 80%, 81%, 82%, 83%, 84%, 85%, 86%, 87%, 88%, 89%, 90%, 91%, 92%, 93%, 94%, 95%, 96%, 97%, 98%, 99%, or 100% identical to the amino acid sequence of SEQ ID NO: 141. In some embodiments, the catalytic domain comprises an amino acid sequence at least 80%, 81%, 82%, 83%, 84%, 85%, 86%, 87%, 88%, 89%, 90%, 91%, 92%, 93%, 94%, 95%, 96%, 97%, 98%, 99%, or 100% identical to the amino acid sequence of SEQ ID NO: 142. In some embodiments, the catalytic domain comprises an amino acid sequence at least 80%, 81%, 82%, 83%, 84%, 85%, 86%, 87%, 88%, 89%, 90%, 91%, 92%, 93%, 94%, 95%, 96%, 97%, 98%, 99%, or 100% identical to the amino acid sequence of SEQ ID NO: 143. In some embodiments, the catalytic domain comprises an amino acid sequence at least 80%, 81%, 82%, 83%, 84%, 85%, 86%, 87%, 88%, 89%, 90%, 91%, 92%, 93%, 94%, 95%, 96%, 97%, 98%, 99%, or 100% identical to the amino acid sequence of SEQ ID NO: 144. In some embodiments, the catalytic domain comprises an amino acid sequence at least 80%, 81%, 82%, 83%, 84%, 85%, 86%, 87%, 88%, 89%, 90%, 91%, 92%, 93%, 94%, 95%, 96%, 97%, 98%, 99%, or 100% identical to the amino acid sequence of SEQ ID NO: 145. In some embodiments, the catalytic domain comprises an amino acid sequence at least 80%, 81%, 82%, 83%, 84%, 85%, 86%, 87%, 88%, 89%, 90%, 91%, 92%, 93%, 94%, 95%, 96%, 97%, 98%, 99%, or 100% identical to the amino acid sequence of SEQ ID NO: 146. In some embodiments, the catalytic domain comprises an amino acid sequence at least 80%, 81%, 82%, 83%, 84%, 85%, 86%, 87%, 88%, 89%, 90%, 91%, 92%, 93%, 94%, 95%, 96%, 97%, 98%, 99%, or 100% identical to the amino acid sequence of SEQ ID NO: 147. In some embodiments, the catalytic domain comprises an amino acid sequence at least 80%, 81%, 82%, 83%, 84%, 85%, 86%, 87%, 88%, 89%, 90%, 91%, 92%, 93%, 94%, 95%, 96%, 97%, 98%, 99%, or 100% identical to the amino acid sequence of SEQ ID NO: 148. In some embodiments, the catalytic domain comprises an amino acid sequence at least 80%, 81%, 82%, 83%, 84%, 85%, 86%, 87%, 88%, 89%, 90%, 91%, 92%, 93%, 94%, 95%, 96%, 97%, 98%, 99%, or 100% identical to the amino acid sequence of SEQ ID NO: 149. In some embodiments, the catalytic domain comprises an amino acid sequence at least 80%, 81%, 82%, 83%, 84%, 85%, 86%, 87%, 88%, 89%, 90%, 91%, 92%, 93%, 94%, 95%, 96%, 97%, 98%, 99%, or 100% identical to the amino acid sequence of SEQ ID NO: 150. In some embodiments, the catalytic domain comprises an amino acid sequence at least 80%, 81%, 82%, 83%, 84%, 85%, 86%, 87%, 88%, 89%, 90%, 91%, 92%, 93%, 94%, 95%, 96%, 97%, 98%, 99%, or 100% identical to the amino acid sequence of SEQ ID NO: 151. In some embodiments, the catalytic domain comprises an amino acid sequence at least 80%, 81%, 82%, 83%, 84%, 85%, 86%, 87%, 88%, 89%, 90%, 91%, 92%, 93%, 94%, 95%, 96%, 97%, 98%, 99%, or 100% identical to the amino acid sequence of SEQ ID NO: 152. In some embodiments, the catalytic domain comprises an amino acid sequence at least 80%, 81%, 82%, 83%, 84%, 85%, 86%, 87%, 88%, 89%, 90%, 91%, 92%, 93%, 94%, 95%, 96%, 97%, 98%, 99%, or 100% identical to the amino acid sequence of SEQ ID NO: 153. In some embodiments, the catalytic domain comprises an amino acid sequence at least 80%, 81%, 82%, 83%, 84%, 85%, 86%, 87%, 88%, 89%, 90%, 91%, 92%, 93%, 94%, 95%, 96%, 97%, 98%, 99%, or 100% identical to the amino acid sequence of SEQ ID NO: 154. In some embodiments, the catalytic domain comprises an amino acid sequence at least 80%, 81%, 82%, 83%, 84%, 85%, 86%, 87%, 88%, 89%, 90%, 91%, 92%, 93%, 94%, 95%, 96%, 97%, 98%, 99%, or 100% identical to the amino acid sequence of SEQ ID NO: 155. In some embodiments, the catalytic domain comprises an amino acid sequence at least 80%, 81%, 82%, 83%, 84%, 85%, 86%, 87%, 88%, 89%, 90%, 91%, 92%, 93%, 94%, 95%, 96%, 97%, 98%, 99%, or 100% identical to the amino acid sequence of SEQ ID NO: 156. In some embodiments, the catalytic domain comprises an amino acid sequence at least 80%, 81%, 82%, 83%, 84%, 85%, 86%, 87%, 88%, 89%, 90%, 91%, 92%, 93%, 94%, 95%, 96%, 97%, 98%, 99%, or 100% identical to the amino acid sequence of SEQ ID NO: 157. In some embodiments, the catalytic domain comprises an amino acid sequence at least 80%, 81%, 82%, 83%, 84%, 85%, 86%, 87%, 88%, 89%, 90%, 91%, 92%, 93%, 94%, 95%, 96%, 97%, 98%, 99%, or 100% identical to the amino acid sequence of SEQ ID NO: 158. In some embodiments, the catalytic domain comprises an amino acid sequence at least 80%, 81%, 82%, 83%, 84%, 85%, 86%, 87%, 88%, 89%, 90%, 91%, 92%, 93%, 94%, 95%, 96%, 97%, 98%, 99%, or 100% identical to the amino acid sequence of SEQ ID NO: 159. In some embodiments, the catalytic domain comprises an amino acid sequence at least 80%, 81%, 82%, 83%, 84%, 85%, 86%, 87%, 88%, 89%, 90%, 91%, 92%, 93%, 94%, 95%, 96%, 97%, 98%, 99%, or 100% identical to the amino acid sequence of SEQ ID NO: 160. In some embodiments, the catalytic domain comprises an amino acid sequence at least 80%, 81%, 82%, 83%, 84%, 85%, 86%, 87%, 88%, 89%, 90%, 91%, 92%, 93%, 94%, 95%, 96%, 97%, 98%, 99%, or 100% identical to the amino acid sequence of SEQ ID NO: 161. In some embodiments, the catalytic domain comprises an amino acid sequence at least 80%, 81%, 82%, 83%, 84%, 85%, 86%, 87%, 88%, 89%, 90%, 91%, 92%, 93%, 94%, 95%, 96%, 97%, 98%, 99%, or 100% identical to the amino acid sequence of SEQ ID NO: 162. In some embodiments, the catalytic domain comprises an amino acid sequence at least 80%, 81%, 82%, 83%, 84%, 85%, 86%, 87%, 88%, 89%, 90%, 91%, 92%, 93%, 94%, 95%, 96%, 97%, 98%, 99%, or 100% identical to the amino acid sequence of SEQ ID NO: 163. In some embodiments, the catalytic domain comprises an amino acid sequence at least 80%, 81%, 82%, 83%, 84%, 85%, 86%, 87%, 88%, 89%, 90%, 91%, 92%, 93%, 94%, 95%, 96%, 97%, 98%, 99%, or 100% identical to the amino acid sequence of SEQ ID NO: 164. In some embodiments, the catalytic domain comprises an amino acid sequence at least 80%, 81%, 82%, 83%, 84%, 85%, 86%, 87%, 88%, 89%, 90%, 91%, 92%, 93%, 94%, 95%, 96%, 97%, 98%, 99%, or 100% identical to the amino acid sequence of SEQ ID NO: 165. In some embodiments, the catalytic domain comprises an amino acid sequence at least 80%, 81%, 82%, 83%, 84%, 85%, 86%, 87%, 88%, 89%, 90%, 91%, 92%, 93%, 94%, 95%, 96%, 97%, 98%, 99%, or 100% identical to the amino acid sequence of SEQ ID NO: 166. In some embodiments, the catalytic domain comprises an amino acid sequence at least 80%, 81%, 82%, 83%, 84%, 85%, 86%, 87%, 88%, 89%, 90%, 91%, 92%, 93%, 94%, 95%, 96%, 97%, 98%, 99%, or 100% identical to the amino acid sequence of SEQ ID NO: 167. In some embodiments, the catalytic domain comprises an amino acid sequence at least 80%, 81%, 82%, 83%, 84%, 85%, 86%, 87%, 88%, 89%, 90%, 91%, 92%, 93%, 94%, 95%, 96%, 97%, 98%, 99%, or 100% identical to the amino acid sequence of SEQ ID NO: 168. In some embodiments, the catalytic domain comprises an amino acid sequence at least 80%, 81%, 82%, 83%, 84%, 85%, 86%, 87%, 88%, 89%, 90%, 91%, 92%, 93%, 94%, 95%, 96%, 97%, 98%, 99%, or 100% identical to the amino acid sequence of SEQ ID NO: 169. In some embodiments, the catalytic domain comprises an amino acid sequence at least 80%, 81%, 82%, 83%, 84%, 85%, 86%, 87%, 88%, 89%, 90%, 91%, 92%, 93%, 94%, 95%, 96%, 97%, 98%, 99%, or 100% identical to the amino acid sequence of SEQ ID NO: 170. In some embodiments, the catalytic domain comprises an amino acid sequence at least 80%, 81%, 82%, 83%, 84%, 85%, 86%, 87%, 88%, 89%, 90%, 91%, 92%, 93%, 94%, 95%, 96%, 97%, 98%, 99%, or 100% identical to the amino acid sequence of SEQ ID NO: 171. In some embodiments, the catalytic domain comprises an amino acid sequence at least 80%, 81%, 82%, 83%, 84%, 85%, 86%, 87%, 88%, 89%, 90%, 91%, 92%, 93%, 94%, 95%, 96%, 97%, 98%, 99%, or 100% identical to the amino acid sequence of SEQ ID NO: 172. In some embodiments, the catalytic domain comprises an amino acid sequence at least 80%, 81%, 82%, 83%, 84%, 85%, 86%, 87%, 88%, 89%, 90%, 91%, 92%, 93%, 94%, 95%, 96%, 97%, 98%, 99%, or 100% identical to the amino acid sequence of SEQ ID NO: 173. In some embodiments, the catalytic domain comprises an amino acid sequence at least 80%, 81%, 82%, 83%, 84%, 85%, 86%, 87%, 88%, 89%, 90%, 91%, 92%, 93%, 94%, 95%, 96%, 97%, 98%, 99%, or 100% identical to the amino acid sequence of SEQ ID NO: 174. In some embodiments, the catalytic domain comprises an amino acid sequence at least 80%, 81%, 82%, 83%, 84%, 85%, 86%, 87%, 88%, 89%, 90%, 91%, 92%, 93%, 94%, 95%, 96%, 97%, 98%, 99%, or 100% identical to the amino acid sequence of SEQ ID NO: 175. In some embodiments, the catalytic domain comprises an amino acid sequence at least 80%, 81%, 82%, 83%, 84%, 85%, 86%, 87%, 88%, 89%, 90%, 91%, 92%, 93%, 94%, 95%, 96%, 97%, 98%, 99%, or 100% identical to the amino acid sequence of SEQ ID NO: 176. In some embodiments, the catalytic domain comprises an amino acid sequence at least 80%, 81%, 82%, 83%, 84%, 85%, 86%, 87%, 88%, 89%, 90%, 91%, 92%, 93%, 94%, 95%, 96%, 97%, 98%, 99%, or 100% identical to the amino acid sequence of SEQ ID NO: 177. In some embodiments, the catalytic domain comprises an amino acid sequence at least 80%, 81%, 82%, 83%, 84%, 85%, 86%, 87%, 88%, 89%, 90%, 91%, 92%, 93%, 94%, 95%, 96%, 97%, 98%, 99%, or 100% identical to the amino acid sequence of SEQ ID NO: 178. In some embodiments, the catalytic domain comprises an amino acid sequence at least 80%, 81%, 82%, 83%, 84%, 85%, 86%, 87%, 88%, 89%, 90%, 91%, 92%, 93%, 94%, 95%, 96%, 97%, 98%, 99%, or 100% identical to the amino acid sequence of SEQ ID NO: 179. In some embodiments, the catalytic domain comprises an amino acid sequence at least 80%, 81%, 82%, 83%, 84%, 85%, 86%, 87%, 88%, 89%, 90%, 91%, 92%, 93%, 94%, 95%, 96%, 97%, 98%, 99%, or 100% identical to the amino acid sequence of SEQ ID NO: 180. In some embodiments, the catalytic domain comprises an amino acid sequence at least 80%, 81%, 82%, 83%, 84%, 85%, 86%, 87%, 88%, 89%, 90%, 91%, 92%, 93%, 94%, 95%, 96%, 97%, 98%, 99%, or 100% identical to the amino acid sequence of SEQ ID NO: 181. In some embodiments, the catalytic domain comprises an amino acid sequence at least 80%, 81%, 82%, 83%, 84%, 85%, 86%, 87%, 88%, 89%, 90%, 91%, 92%, 93%, 94%, 95%, 96%, 97%, 98%, 99%, or 100% identical to the amino acid sequence of SEQ ID NO: 182. In some embodiments, the catalytic domain comprises an amino acid sequence at least 80%, 81%, 82%, 83%, 84%, 85%, 86%, 87%, 88%, 89%, 90%, 91%, 92%, 93%, 94%, 95%, 96%, 97%, 98%, 99%, or 100% identical to the amino acid sequence of SEQ ID NO: 183. In some embodiments, the catalytic domain comprises an amino acid sequence at least 80%, 81%, 82%, 83%, 84%, 85%, 86%, 87%, 88%, 89%, 90%, 91%, 92%, 93%, 94%, 95%, 96%, 97%, 98%, 99%, or 100% identical to the amino acid sequence of SEQ ID NO: 184. In some embodiments, the catalytic domain comprises an amino acid sequence at least 80%, 81%, 82%, 83%, 84%, 85%, 86%, 87%, 88%, 89%, 90%, 91%, 92%, 93%, 94%, 95%, 96%, 97%, 98%, 99%, or 100% identical to the amino acid sequence of SEQ ID NO: 185. In some embodiments, the catalytic domain comprises an amino acid sequence at least 80%, 81%, 82%, 83%, 84%, 85%, 86%, 87%, 88%, 89%, 90%, 91%, 92%, 93%, 94%, 95%, 96%, 97%, 98%, 99%, or 100% identical to the amino acid sequence of SEQ ID NO: 186. In some embodiments, the catalytic domain comprises an amino acid sequence at least 80%, 81%, 82%, 83%, 84%, 85%, 86%, 87%, 88%, 89%, 90%, 91%, 92%, 93%, 94%, 95%, 96%, 97%, 98%, 99%, or 100% identical to the amino acid sequence of SEQ ID NO: 187. In some embodiments, the catalytic domain comprises an amino acid sequence at least 80%, 81%, 82%, 83%, 84%, 85%, 86%, 87%, 88%, 89%, 90%, 91%, 92%, 93%, 94%, 95%, 96%, 97%, 98%, 99%, or 100% identical to the amino acid sequence of SEQ ID NO: 188. In some embodiments, the catalytic domain comprises an amino acid sequence at least 80%, 81%, 82%, 83%, 84%, 85%, 86%, 87%, 88%, 89%, 90%, 91%, 92%, 93%, 94%, 95%, 96%, 97%, 98%, 99%, or 100% identical to the amino acid sequence of SEQ ID NO: 189. In some embodiments, the catalytic domain comprises an amino acid sequence at least 80%, 81%, 82%, 83%, 84%, 85%, 86%, 87%, 88%, 89%, 90%, 91%, 92%, 93%, 94%, 95%, 96%, 97%, 98%, 99%, or 100% identical to the amino acid sequence of SEQ ID NO: 190. In some embodiments, the catalytic domain comprises an amino acid sequence at least 80%, 81%, 82%, 83%, 84%, 85%, 86%, 87%, 88%, 89%, 90%, 91%, 92%, 93%, 94%, 95%, 96%, 97%, 98%, 99%, or 100% identical to the amino acid sequence of SEQ ID NO: 191. In some embodiments, the catalytic domain comprises an amino acid sequence at least 80%, 81%, 82%, 83%, 84%, 85%, 86%, 87%, 88%, 89%, 90%, 91%, 92%, 93%, 94%, 95%, 96%, 97%, 98%, 99%, or 100% identical to the amino acid sequence of SEQ ID NO: 192. In some embodiments, the catalytic domain comprises an amino acid sequence at least 80%, 81%, 82%, 83%, 84%, 85%, 86%, 87%, 88%, 89%, 90%, 91%, 92%, 93%, 94%, 95%, 96%, 97%, 98%, 99%, or 100% identical to the amino acid sequence of SEQ ID NO: 193. In some embodiments, the catalytic domain comprises an amino acid sequence at least 80%, 81%, 82%, 83%, 84%, 85%, 86%, 87%, 88%, 89%, 90%, 91%, 92%, 93%, 94%, 95%, 96%, 97%, 98%, 99%, or 100% identical to the amino acid sequence of SEQ ID NO: 194. In some embodiments, the catalytic domain comprises an amino acid sequence at least 80%, 81%, 82%, 83%, 84%, 85%, 86%, 87%, 88%, 89%, 90%, 91%, 92%, 93%, 94%, 95%, 96%, 97%, 98%, 99%, or 100% identical to the amino acid sequence of SEQ ID NO: 195. In some embodiments, the catalytic domain comprises an amino acid sequence at least 80%, 81%, 82%, 83%, 84%, 85%, 86%, 87%, 88%, 89%, 90%, 91%, 92%, 93%, 94%, 95%, 96%, 97%, 98%, 99%, or 100% identical to the amino acid sequence of SEQ ID NO: 196. In some embodiments, the catalytic domain comprises an amino acid sequence at least 80%, 81%, 82%, 83%, 84%, 85%, 86%, 87%, 88%, 89%, 90%, 91%, 92%, 93%, 94%, 95%, 96%, 97%, 98%, 99%, or 100% identical to the amino acid sequence of SEQ ID NO: 197. In some embodiments, the catalytic domain comprises an amino acid sequence at least 80%, 81%, 82%, 83%, 84%, 85%, 86%, 87%, 88%, 89%, 90%, 91%, 92%, 93%, 94%, 95%, 96%, 97%, 98%, 99%, or 100% identical to the amino acid sequence of SEQ ID NO: 198. In some embodiments, the catalytic domain comprises an amino acid sequence at least 80%, 81%, 82%, 83%, 84%, 85%, 86%, 87%, 88%, 89%, 90%, 91%, 92%, 93%, 94%, 95%, 96%, 97%, 98%, 99%, or 100% identical to the amino acid sequence of SEQ ID NO: 199. In some embodiments, the catalytic domain comprises an amino acid sequence at least 80%, 81%, 82%, 83%, 84%, 85%, 86%, 87%, 88%, 89%, 90%, 91%, 92%, 93%, 94%, 95%, 96%, 97%, 98%, 99%, or 100% identical to the amino acid sequence of SEQ ID NO: 200. In some embodiments, the catalytic domain comprises an amino acid sequence at least 80%, 81%, 82%, 83%, 84%, 85%, 86%, 87%, 88%, 89%, 90%, 91%, 92%, 93%, 94%, 95%, 96%, 97%, 98%, 99%, or 100% identical to the amino acid sequence of SEQ ID NO: 201. In some embodiments, the catalytic domain comprises an amino acid sequence at least 80%, 81%, 82%, 83%, 84%, 85%, 86%, 87%, 88%, 89%, 90%, 91%, 92%, 93%, 94%, 95%, 96%, 97%, 98%, 99%, or 100% identical to the amino acid sequence of SEQ ID NO: 202. In some embodiments, the catalytic domain comprises an amino acid sequence at least 80%, 81%, 82%, 83%, 84%, 85%, 86%, 87%, 88%, 89%, 90%, 91%, 92%, 93%, 94%, 95%, 96%, 97%, 98%, 99%, or 100% identical to the amino acid sequence of SEQ ID NO: 203. In some embodiments, the catalytic domain comprises an amino acid sequence at least 80%, 81%, 82%, 83%, 84%, 85%, 86%, 87%, 88%, 89%, 90%, 91%, 92%, 93%, 94%, 95%, 96%, 97%, 98%, 99%, or 100% identical to the amino acid sequence of SEQ ID NO: 204. In some embodiments, the catalytic domain comprises an amino acid sequence at least 80%, 81%, 82%, 83%, 84%, 85%, 86%, 87%, 88%, 89%, 90%, 91%, 92%, 93%, 94%, 95%, 96%, 97%, 98%, 99%, or 100% identical to the amino acid sequence of SEQ ID NO: 205. In some embodiments, the catalytic domain comprises an amino acid sequence at least 80%, 81%, 82%, 83%, 84%, 85%, 86%, 87%, 88%, 89%, 90%, 91%, 92%, 93%, 94%, 95%, 96%, 97%, 98%, 99%, or 100% identical to the amino acid sequence of SEQ ID NO: 206. In some embodiments, the catalytic domain comprises an amino acid sequence at least 80%, 81%, 82%, 83%, 84%, 85%, 86%, 87%, 88%, 89%, 90%, 91%, 92%, 93%, 94%, 95%, 96%, 97%, 98%, 99%, or 100% identical to the amino acid sequence of SEQ ID NO: 207. In some embodiments, the catalytic domain comprises an amino acid sequence at least 80%, 81%, 82%, 83%, 84%, 85%, 86%, 87%, 88%, 89%, 90%, 91%, 92%, 93%, 94%, 95%, 96%, 97%, 98%, 99%, or 100% identical to the amino acid sequence of SEQ ID NO: 208. In some embodiments, the catalytic domain comprises an amino acid sequence at least 80%, 81%, 82%, 83%, 84%, 85%, 86%, 87%, 88%, 89%, 90%, 91%, 92%, 93%, 94%, 95%, 96%, 97%, 98%, 99%, or 100% identical to the amino acid sequence of SEQ ID NO: 209. In some embodiments, the catalytic domain comprises an amino acid sequence at least 80%, 81%, 82%, 83%, 84%, 85%, 86%, 87%, 88%, 89%, 90%, 91%, 92%, 93%, 94%, 95%, 96%, 97%, 98%, 99%, or 100% identical to the amino acid sequence of SEQ ID NO: 210. In some embodiments, the catalytic domain comprises an amino acid sequence at least 80%, 81%, 82%, 83%, 84%, 85%, 86%, 87%, 88%, 89%, 90%, 91%, 92%, 93%, 94%, 95%, 96%, 97%, 98%, 99%, or 100% identical to the amino acid sequence of SEQ ID NO: 211. In some embodiments, the catalytic domain comprises an amino acid sequence at least 80%, 81%, 82%, 83%, 84%, 85%, 86%, 87%, 88%, 89%, 90%, 91%, 92%, 93%, 94%, 95%, 96%, 97%, 98%, 99%, or 100% identical to the amino acid sequence of SEQ ID NO: 212. In some embodiments, the catalytic domain comprises an amino acid sequence at least 80%, 81%, 82%, 83%, 84%, 85%, 86%, 87%, 88%, 89%, 90%, 91%, 92%, 93%, 94%, 95%, 96%, 97%, 98%, 99%, or 100% identical to the amino acid sequence of SEQ ID NO: 213. In some embodiments, the catalytic domain comprises an amino acid sequence at least 80%, 81%, 82%, 83%, 84%, 85%, 86%, 87%, 88%, 89%, 90%, 91%, 92%, 93%, 94%, 95%, 96%, 97%, 98%, 99%, or 100% identical to the amino acid sequence of SEQ ID NO: 214. In some embodiments, the catalytic domain comprises an amino acid sequence at least 80%, 81%, 82%, 83%, 84%, 85%, 86%, 87%, 88%, 89%, 90%, 91%, 92%, 93%, 94%, 95%, 96%, 97%, 98%, 99%, or 100% identical to the amino acid sequence of SEQ ID NO: 215. In some embodiments, the catalytic domain comprises an amino acid sequence at least 80%, 81%, 82%, 83%, 84%, 85%, 86%, 87%, 88%, 89%, 90%, 91%, 92%, 93%, 94%, 95%, 96%, 97%, 98%, 99%, or 100% identical to the amino acid sequence of SEQ ID NO: 216. In some embodiments, the catalytic domain comprises an amino acid sequence at least 80%, 81%, 82%, 83%, 84%, 85%, 86%, 87%, 88%, 89%, 90%, 91%, 92%, 93%, 94%, 95%, 96%, 97%, 98%, 99%, or 100% identical to the amino acid sequence of SEQ ID NO: 217. In some embodiments, the catalytic domain comprises an amino acid sequence at least 80%, 81%, 82%, 83%, 84%, 85%, 86%, 87%, 88%, 89%, 90%, 91%, 92%, 93%, 94%, 95%, 96%, 97%, 98%, 99%, or 100% identical to the amino acid sequence of SEQ ID NO: 218. In some embodiments, the catalytic domain comprises an amino acid sequence at least 80%, 81%, 82%, 83%, 84%, 85%, 86%, 87%, 88%, 89%, 90%, 91%, 92%, 93%, 94%, 95%, 96%, 97%, 98%, 99%, or 100% identical to the amino acid sequence of SEQ ID NO: 219. In some embodiments, the catalytic domain comprises an amino acid sequence at least 80%, 81%, 82%, 83%, 84%, 85%, 86%, 87%, 88%, 89%, 90%, 91%, 92%, 93%, 94%, 95%, 96%, 97%, 98%, 99%, or 100% identical to the amino acid sequence of SEQ ID NO: 220. In some embodiments, the catalytic domain comprises an amino acid sequence at least 80%, 81%, 82%, 83%, 84%, 85%, 86%, 87%, 88%, 89%, 90%, 91%, 92%, 93%, 94%, 95%, 96%, 97%, 98%, 99%, or 100% identical to the amino acid sequence of SEQ ID NO: 270.

[0149] Table 1 below describes, the amino acid sequence of exemplary human deubiquitinases and exemplary catalytic domains of the exemplary human deubiquitinases. The catalytic domains are exemplary. A person of ordinary skill in the art could readily determine a sufficient amino acid sequence of a human deubiquitinase to mediate deubiquitination (e.g., a catalytic domain). Any of the human deubiquitinases (functional fragment or variants thereof) may be used to derive a catalytic domain for use in a fusion protein described herein.

TABLE 1
The amino acid sequence of exemplary human deubiquitinases and
exemplary catalytic domains of the same

| | SEQ | | SEQ | Exemplary Catalytic |
|---|---|---|---|---|
| | ID | | ID | Domains (Amino |
| Description | NO | Amino Acid Sequence | NO | Acid Sequence) |
| UBP27_HUMAN | 1 | MCKDYVYDKDIEQIAKEEQGEA | 113 | SSFTIGLRGLINLGNTCEMN |
| Ubiquitin | | LKLQASTSTEVSHQQCSVPGLG | | CIVQALTHTPILRDFFLSDR |
| carboxyl- | | EKFPTWETTKPELELLGHNPRR | | HRCEMPSPELCLVCEMSSLF |
| terminal | | RRITSSFTIGLRGLINLGNTCF | | RELYSGNPSPHVPYKLLHLV |
| hydrolase | | MNCIVQALTHTPILRDFFLSDR | | WIHARHLAGYRQQDAHEFLI |
| 27 | | HRCEMPSPELCLVCEMSSLFRE | | AALDVLHRHCKGDDVGKAAN |
| | | LYSGNPSPHVPYKLLHLVWIHA | | NPNHCNCIIDQIFTGGLQSD |
| | | RHLAGYRQQDAHEFLIAALDVL | | VTCQACHGVSTTIDPCWDIS |
| | | HRHCKGDDVGKAANNPNHCNCI | | LDLPGSCTSFWPMSPGRESS |
| | | IDQIFTGGLQSDVTCQACHGVS | | VNGESHIPGITTLTDCLRRF |
| | | TTIDPCWDISLDLPGSCTSFWP | | TRPEHLGSSAKIKCGSCQSY |
| | | MSPGRESSVNGESHIPGITTLT | | QESTKQLTMNKLPVVACFHF |
| | | DCLRRFTRPEHLGSSAKIKCGS | | KRFEHSAKQRRKITTYISFP |
| | | CQSYQESTKQLTMNKLPVVACF | | LELDMTPFMASSKESRMNGQ |
| | | HFKRFEHSAKQRRKITTYISFP | | LQLPTNSGNNENKYSLFAVV |
| | | LELDMTPFMASSKESRMNGQLQ | | NHQGTLESGHYTSFIRHHKD |
| | | LPTNSGNNENKYSLFAVVNHQG | | QWFKCDDAVITKASIKDVLD |
| | | TLESGHYTSFIRHHKDQWFKCD | | SEGYLLFYHKQVLEHESEKV |
| | | DAVITKASIKDVLDSEGYLLFY | | KEMNTQAY |
| | | HKQVLEHESEKVKEMNTQAY | | |
| UBP48_HUMAN | 2 | MAPRLQLEKAAWRWAETVRPEE | 114 | NSFHNIDDPNCERRKKNSFV |
| Ubiquitin | | VSQEHIETAYRIWLEPCIRGVC | | GLTNLGATCYVNTFLQVWFL |
| carboxyl- | | RRNCKGNPNCLVGIGEHIWLGE | | NLELRQALYLCPSTCSDYML |
| terminal | | IDENSFHNIDDPNCERRKKNSF | | GDGIQEEKDYEPQTICEHLQ |
| hydrolase | | VGLTNLGATCYVNTFLQVWFLN | | YLFALLQNSNRRYIDPSGFV |
| 48 | | LELRQALYLCPSTCSDYMLGDG | | KALGLDTGQQQDAQEFSKLF |
| | | IQEEKDYEPQTICEHLQYLFAL | | MSLLEDTLSKQKNPDVRNIV |
| | | LQNSNRRYIDPSGFVKALGLDT | | QQQFCGEYAYVTVCNQCGRE |
| | | GQQQDAQEFSKLFMSLLEDTLS | | SKLLSKFYELELNIQGHKQL |
| | | KQKNPDVRNIVQQQFCGEYAYV | | TDCISEFLKEEKLEGDNRYF |
| | | TVCNQCGRESKLLSKFYELELN | | CENCQSKQNATRKIRLLSLP |
| | | IQGHKQLTDCISEFLKEEKLEG | | CTLNLQLMRFVFDRQTGHKK |
| | | DNRYFCENCQSKQNATRKIRLL | | KLNTYIGFSEILDMEPYVEH |
| | | SLPCTLNLQLMRFVFDRQTGHK | | KGGSYVYELSAVLIHRGVSA |
| | | KKLNTYIGFSEILDMEPYVEHK | | YSGHYIAHVKDPQSGEWYKF |
| | | GGSYVYELSAVLIHRGVSAYSG | | NDEDIEKMEGKKLQLGIEED |
| | | HYIAHVKDPQSGEWYKFNDEDI | | LAEPSKSQTRKPKCGKGTHC |
| | | EKMEGKKLQLGIEEDLAEPSKS | | SRNAYMLVYRLQT |
| | | QTRKPKCGKGTHCSRNAYMLVY | | |
| | | RLQTQEKPNTTVQVPAFLQELV | | |
| | | DRDNSKFEEWCIEMAEMRKQSV | | |
| | | DKGKAKHEEVKELYQRLPAGAE | | |
| | | PYEFVSLEWLQKWLDESTPTKP | | |
| | | IDNHACLCSHDKLHPDKISIMK | | |
| | | RISEYAADIFYSRYGGGPRLTV | | |
| | | KALCKECVVERCRILRLKNQLN | | |
| | | EDYKTVNNLLKAAVKGSDGFWV | | |
| | | GKSSLRSWRQLALEQLDEQDGD | | |
| | | AEQSNGKMNGSTLNKDESKEER | | |
| | | KEEEELNFNEDILCPHGELCIS | | |
| | | ENERRLVSKEAWSKLQQYFPKA | | |
| | | PEFPSYKECCSQCKILEREGEE | | |
| | | NEALHKMIANEQKTSLPNLFQD | | |
| | | KNRPCLSNWPEDTDVLYIVSQF | | |
| | | FVEEWRKFVRKPTRCSPVSSVG | | |
| | | NSALLCPHGGLMFTFASMTKED | | |
| | | SKLIALIWPSEWQMIQKLFVVD | | |
| | | HVIKITRIEVGDVNPSETQYIS | | |
| | | EPKLCPECREGLLCQQQRDLRE | | |
| | | YTQATIYVHKVVDNKKVMKDSA | | |
| | | PELNVSSSETEEDKEEAKPDGE | | |
| | | KDPDFNQSNGGTKRQKISHQNY | | |
| | | IAYQKQVIRRSMRHRKVRGEKA | | |
| | | LLVSANQTLKELKIQIMHAFSV | | |
| | | APFDQNLSIDGKILSDDCATLG | | |
| | | TLGVIPESVILLKADEPIADYA | | |
| | | AMDDVMQVCMPEEGFKGTGLLG | | |
| | | H | | |
| UBP3_HUMAN | 3 | MECPHLSSSVCIAPDSAKFPNG | 115 | TAICATGLRNLGNTCFMNAI |
| Ubiquitin | | SPSSWCCSVCRSNKSPWVCLTC | | LQSLSNIEQFCCYFKELPAV |
| carboxyl- | | SSVHCGRYVNGHAKKHYEDAQV | | ELRNGKTAGRRTYHTRSQGD |
| terminal | | PLTNHKKSEKQDKVQHTVCMDC | | NNVSLVEEFRKTLCALWQGS |
| hydrolase | | SSYSTYCYRCDDFVVNDTKLGL | | QTAFSPESLFYVVWKIMPNF |
| 3 | | VQKVREHLQNLENSAFTADRHK | | RGYQQQDAHEFMRYLLDHLH |
| | | KRKLLENSTLNSKLLKVNGSTT | | LELQGGFNGVSRSAILQENS |
| | | AICATGLRNLGNTCFMNAILQS | | TLSASNKCCINGASTVVTAI |
| | | LSNIEQFCCYFKELPAVELRNG | | FGGILQNEVNCLICGTESRK |
| | | KTAGRRTYHTRSQGDNNVSLVE | | FDPFLDLSLDIPSQFRSKRS |
| | | EFRKTLCALWQGSQTAFSPESL | | KNQENGPVCSLRDCLRSFTD |
| | | FYVVWKIMPNFRGYQQQDAHEF | | LEELDETELYMCHKCKKKQK |
| | | MRYLLDHLHLELQGGFNGVSRS | | STKKFWIQKLPKVLCLHLKR |
| | | AILQENSTLSASNKCCINGAST | | FHWTAYLRNKVDTYVEFPLR |
| | | VVTAIFGGILQNEVNCLICGTE | | GLDMKCYLLEPENSGPESCL |
| | | SRKFDPFLDLSLDIPSQFRSKR | | YDLAAVVVHHGSGVGSGHYT |
| | | SKNQENGPVCSLRDCLRSFTDL | | AYATHEGRWFHFNDSTVTLT |
| | | EELDETELYMCHKCKKKQKSTK | | DEETVVKAKAYILFYVEHQ |
| | | KFWIQKLPKVLCLHLKRFHWTA | | |
| | | YLRNKVDTYVEFPLRGLDMKCY | | |
| | | LLEPENSGPESCLYDLAAVVVH | | |
| | | HGSGVGSGHYTAYATHEGRWFH | | |
| | | FNDSTVTLTDEETVVKAKAYIL | | |
| | | FYVEHQAKAGSDKL | | |
| U17LB_HUMAN | 4 | QLAPREKLPLSSRRPAAVGAGL | 116 | AVGAGLQNMGNTCYVNASLQ |
| Ubiquitin | | QNMGNTCYVNASLQCLTYTPPL | | CLTYTPPLANYMLSREHSQT |
| carboxyl- | | ANYMLSREHSQTCHRHKGCMLC | | CHRHKGCMLCTMQAHITRAL |
| terminal | | TMQAHITRALHNPGHVIQPSQA | | HNPGHVIQPSQALAAGFHRG |
| hydrolase | | LAAGFHRGKQEDAHEFLMFTVD | | KQEDAHEFLMFTVDAMKKAC |
| 17-like | | AMKKACLPGHKQVDHHSKDTTL | | LPGHKQVDHHSKDTTLIHQI |
| protein 11 | | IHQIFGGYWRSQIKCLHCHGIS | | FGGYWRSQIKCLHCHGISDT |
| | | DTFDPYLDIALDIQAAQSVQQA | | FDPYLDIALDIQAAQSVQQA |
| | | LEQLVKPEELNGENAYHCGVCL | | LEQLVKPEELNGENAYHCGV |
| | | QRAPASKTLTLHTSAKVLILVL | | CLQRAPASKTLTLHTSAKVL |
| | | KRFSDVTGNKIAKNVQYPECLD | | ILVLKRFSDVTGNKIAKNVQ |
| | | MQPYMSQTNTGPLVYVLYAVLV | | YPECLDMQPYMSQTNTGPLV |
| | | HAGWSCHNGHYFSYVKAQEGQW | | YVLYAVLVHAGWSCHNGHYF |
| | | YKMDDAEVTASSITSVLSQQAY | | SYVKAQEGQWYKMDDAEVTA |
| | | VLFYIQKSEWERHSESVSRGRE | | SSITSVLSQQAYVLFYIQKS |
| | | PRALGAEDTDRRATQGELKRDH | | |
| | | PCLQAPELDEHLVERATQESTL | | |
| | | DHWKFLQEQNKTKPEFNVRKVE | | |
| | | GTLPPDVLVIHQSKYKCGMKNH | | |
| | | HPEQQSSLLNLSSTTPTHQESM | | |
| | | NTGTLASLRGRARRSKGKNKHS | | |
| | | KRALLVCQ | | |
| UBP1_HUMAN | 5 | MPGVIPSESNGLSRGSPSKKNR | 117 | LPFVGLNNLGNTCYLNSILQ |
| Ubiquitin | | LSLKFFQKKETKRALDFTDSQE | | VLYFCPGFKSGVKHLFNIIS |
| carboxyl- | | NEEKASEYRASEIDQVVPAAQS | | RKKEALKDEANQKDKGNCKE |
| terminal | | SPINCEKRENLLPFVGLNNLGN | | DSLASYELICSLQSLIISVE |
| hydrolase | | TCYLNSILQVLYFCPGFKSGVK | | QLQASFLLNPEKYTDELATQ |
| 1 | | HLFNIISRKKEALKDEANQKDK | | PRRLLNTLRELNPMYEGYLQ |
| | | GNCKEDSLASYELICSLQSLII | | HDAQEVLQCILGNIQETCQL |
| | | SVEQLQASFLLNPEKYTDELAT | | LKKEEVKNVAELPTKVEEIP |
| | | QPRRLLNTLRELNPMYEGYLQH | | HPKEEMNGINSIEMDSMRHS |
| | | DAQEVLQCILGNIQETCQLLKK | | EDFKEKLPKGNGKRKSDTEF |
| | | EEVKNVAELPTKVEEIPHPKEE | | GNMKKKVKLSKEHQSLEENQ |
| | | MNGINSIEMDSMRHSEDFKEKL | | RQTRSKRKATSDTLESPPKI |
| | | PKGNGKRKSDTEFGNMKKKVKL | | IPKYISENESPRPSQKKSRV |
| | | SKEHQSLEENQRQTRSKRKATS | | KINWLKSATKQPSILSKFCS |
| | | DTLESPPKIIPKYISENESPRP | | LGKITTNQGVKGQSKENECD |
| | | SQKKSRVKINWLKSATKQPSIL | | PEEDLGKCESDNTTNGCGLE |
| | | SKFCSLGKITTNQGVKGQSKEN | | SPGNTVTPVNVNEVKPINKG |
| | | ECDPEEDLGKCESDNTTNGCGL | | EEQIGFELVEKLFQGQLVLR |
| | | ESPGNTVTPVNVNEVKPINKGE | | TRCLECESLTERREDFQDIS |
| | | EQIGFELVEKLFQGQLVLRTRC | | VPVQEDELSKVEESSEISPE |
| | | LECESLTERREDFQDISVPVQE | | PKTEMKTLRWAISQFASVER |
| | | DELSKVEESSEISPEPKTEMKT | | IVGEDKYFCENCHHYTEAER |
| | | LRWAISQFASVERIVGEDKYFC | | SLLFDKMPEVITIHLKCFAA |
| | | ENCHHYTEAERSLLFDKMPEVI | | SGLEFDCYGGGLSKINTPLL |
| | | TIHLKCFAASGLEFDCYGGGLS | | TPLKLSLEEWSTKPTNDSYG |
| | | KINTPLLTPLKLSLEEWSTKPT | | LFAVVMHSGITISSGHYTAS |
| | | NDSYGLFAVVMHSGITISSGHY | | VKVTDLNSLELDKGNFVVDQ |
| | | TASVKVTDLNSLELDKGNFVVD | | MCEIGKPEPLNEEEARGVVE |
| | | QMCEIGKPEPLNEEEARGVVEN | | NYNDEEVSIRVGGNTQPSKV |
| | | YNDEEVSIRVGGNTQPSKVLNK | | LNKKNVEAIGLLGGQKSKAD |
| | | KNVEAIGLLGGQKSKADYELYN | | YELYNKASNPDKVASTAFAE |
| | | KASNPDKVASTAFAENRNSETS | | NRNSETSDTTGTHESDRNKE |
| | | DTTGTHESDRNKESSDQTGINI | | SSDQTGINISGFENKISYVV |
| | | SGFENKISYVVQSLKEYEGKWL | | QSLKEYEGKWLLFDDSEVKV |
| | | LFDDSEVKVTEEKDFLNSLSPS | | TEEKDFLNSLSPSTSPTSTP |
| | | TSPTSTPYLLFYKKL | | YLLFYKKL |
| UBP40_HUMAN | 6 | MFGDLFEEEYSTVSNNQYGKGK | 118 | FTNLSGIRNQGGTCYLNSLL |
| Ubiquitin | | KLKTKALEPPAPREFTNLSGIR | | QTLHFTPEFREALFSLGPEE |
| carboxyl- | | NQGGTCYLNSLLQTLHFTPEFR | | LGLFEDKDKPDAKVRIIPLQ |
| terminal | | EALFSLGPEELGLFEDKDKPDA | | LQRLFAQLLLLDQEAASTAD |
| hydrolase | | KVRIIPLQLQRLFAQLLLLDQE | | LTDSFGWTSNEEMRQHDVQE |
| 40 | | AASTADLTDSFGWTSNEEMRQH | | LNRILFSALETSLVGTSGHD |
| | | DVQELNRILFSALETSLVGTSG | | LIYRLYHGTIVNQIVCKECK |
| | | HDLIYRLYHGTIVNQIVCKECK | | NVSERQEDFLDLTVAVKNVS |
| | | NVSERQEDFLDLTVAVKNVSGL | | GLEDALWNMYVEEEVFDCDN |
| | | EDALWNMYVEEEVFDCDNLYHC | | LYHCGTCDRLVKAAKSAKLR |
| | | GTCDRLVKAAKSAKLRKLPPFL | | KLPPFLTVSLLRFNFDFVKC |
| | | TVSLLRFNFDFVKCERYKETSC | | ERYKETSCYTFPLRINLKPF |
| | | YTFPLRINLKPFCEQSELDDLE | | CEQSELDDLEYIYDLFSVII |
| | | YIYDLFSVIIHKGGCYGGHYHV | | HKGG |
| | | YIKDVDHLGNWQFQEEKSKPDV | | CYGGHYHVYIKDVDHLGNWQ |
| | | NLKDLQSEEEIDHPLMILKAIL | | FQEEKSKPDVNLKDLQSEEE |
| | | LEENNLIPVDQLGQKLLKKIGI | | IDHPLMILKAILLEENNLIP |
| | | SWNKKYRKQHGPLRKFLQLHSQ | | VDQLGQKLLKKIGISWNKKY |
| | | IFLLSSDESTVRLLKNSSLQAE | | RKQHGPLRKFLQLHSQIFLL |
| | | SDFQRNDQQIFKMLPPESPGLN | | SSDESTVRLLKNSSLQAESD |
| | | NSISCPHWFDINDSKVQPIREK | | FQRNDQQIFKMLPPESPGLN |
| | | DIEQQFQGKESAYMLFYRKSQL | | NSISCPHWFDINDSKVQPIR |
| | | QRPPEARANPRYGVPCHLLNEM | | EKDIEQQFQGKESAYMLFYR |
| | | DAANIELQTKRAECDSANNTFE | | KSQLQRPPEARANPRYGVPC |
| | | LHLHLGPQYHFENGALHPVVSQ | | HLLNEMDAANIELQTKRAEC |
| | | TESVWDLTFDKRKTLGDLRQSI | | DSANNTFELHLHLGPQYHFF |
| | | FQLLEFWEGDMVLSVAKLVPAG | | NGALHPVVSQTESVWDLTFD |
| | | LHIYQSLGGDELTLCETEIADG | | KRKTLGDLRQSIFQLLEFWE |
| | | EDIFVWNGVEVGGVHIQTGIDC | | GDMVLSVAKLVPAGLHIYQS |
| | | EPLLLNVLHLDTSSDGEKCCQV | | LGGDELTLCETEIADGEDIF |
| | | IESPHVFPANAEVGTVLTALAI | | VWNGVEVGGVHIQTGIDCEP |
| | | PAGVIFINSAGCPGGEGWTAIP | | LLLNVLHLDTSSDGEKCCQV |
| | | KEDMRKTFREQGLRNGSSILIQ | | IESPHVFPANAEVGTVLTAL |
| | | DSHDDNSLLTKEEKWVTSMNEI | | AIPAGVIFINSAGCPGGEGW |
| | | DWLHVKNLCQLESEEKQVKISA | | TAIPKEDMRKTFREQGLRNG |
| | | TVNTMVFDIRIKAIKELKLMKE | | SSILIQDSHDDNSLLTKEEK |
| | | LADNSCLRPIDRNGKLLCPVPD | | WVTSMNEIDWLHVKNLCQLE |
| | | SYTLKEAELKMGSSLGLCLGKA | | SEEKQVKISATVNTMVFDIR |
| | | PSSSQLFLFFAMGSDVQPGTEM | | IKAIKELKLMKELADNSCLR |
| | | EIVVEETISVRDCLKLMLKKSG | | PIDRNGKLLCPVPDSYTLKE |
| | | LQGDAWHLRKMDWCYEAGEPLC | | AELKMGSSLGLCLGKAPSSS |
| | | EEDATLKELLICSGDTLLLIEG | | QLFLFFAMGSDVQPGTEMEI |
| | | QLPPLGFLKVPIWWYQLQGPSG | | VVEETISVRDCLKLMLKKSG |
| | | HWESHQDQTNCTSSWGRVWRAT | | LQGDAWHLRKMDWCYEAGEP |
| | | SSQGASGNEPAQVSLLYLGDIE | | LCEEDATLKELLICSGDTLL |
| | | ISEDATLAELKSQAMTLPPFLE | | LIEGQLPPLGFLKVPIWWYQ |
| | | FGVPSPAHLRAWTVERKRPGRL | | LQGPSGHWESHQDQTNCTSS |
| | | LRTDRQPLREYKLGRRIEICLE | | WGRVWRATSSQGASGNEPAQ |
| | | PLQKGENLGPQDVLLRTQVRIP | | VSLLYLGDIEISEDATLAEL |
| | | GERTYAPALDLVWNAAQGGTAG | | KSQAMTLPPFLEFGVPSPAH |
| | | SLRQRVADFYRLPVEKIEIAKY | | LRAWTVERKRPGRLLRTDRQ |
| | | FPEKFEWLPISSWNQQITKRKK | | PLREYKLGRRIEICLEPLQK |
| | | KKKQDYLQGAPYYLKDGDTIGV | | GENLGPQDVLLRTQVRIPGE |
| | | KNLLIDDDDDFSTIRDDTGKEK | | RTYAPALDLVWNAAQGGTAG |
| | | QKQRALGRRKSQEALHEQSSYI | | SLRQRVADFYRLPVEKIEIA |
| | | LSSAETPARPRAPETSLSIHVG | | KYFPEKFEWLPISSWNQQIT |
| | | SFR | | KRKKKKKQDYLQGAPYYLKD |
| | | | | GDTIGVKNLLIDDDDDFSTI |
| | | | | RDDTGKEKQKQRALGRRKSQ |
| UBP7_HUMAN | 7 | MNHQQQQQQQKAGEQQLSEPED | 119 | TGYVGLKNQGATCYMNSLLQ |
| Ubiquitin | | MEMEAGDTDDPPRITQNPVING | | TLFFTNQLRKAVYMMPTEGD |
| carboxyl- | | NVALSDGHNTAEEDMEDDTSWR | | DSSKSVPLALQRVFYELQHS |
| terminal | | SEATFQFTVERFSRLSESVLSP | | DKPVGTKKLTKSFGWETLDS |
| hydrolase | | PCFVRNLPWKIMVMPRFYPDRP | | FMQHDVQELCRVLLDNVENK |
| 7 | | HQKSVGFFLQCNAESDSTSWSC | | MKGTCVEGTIPKLFRGKMVS |
| | | HAQAVLKIINYRDDEKSFSRRI | | YIQCKEVDYRSDRREDYYDI |
| | | SHLFFHKENDWGFSNFMAWSEV | | QLSIKGKKNIFESFVDYVAV |
| | | TDPEKGFIDDDKVTFEVFVQAD | | EQLDGDNKYDAGEHGLQEAE |
| | | APHGVAWDSKKHTGYVGLKNQG | | KGVKFLTLPPVLHLQLMRFM |
| | | ATCYMNSLLQTLFFTNQLRKAV | | YDPQTDQNIKINDRFEFPEQ |
| | | YMMPTEGDDSSKSVPLALQRVF | | LPLDEFLQKTDPKDPANYIL |
| | | YELQHSDKPVGTKKLTKSFGWE | | HAVLVHSGDNHGGHYVVYLN |
| | | TLDSFMQHDVQELCRVLLDNVE | | PKGDGKWCKFDDDVVSRCTK |
| | | NKMKGTCVEGTIPKLFRGKMVS | | EEAIEHNYGGHDDDLSVRHC |
| | | YIQCKEVDYRSDRREDYYDIQL | | TNAYMLVYIRE |
| | | SIKGKKNIFESFVDYVAVEQLD | | |
| | | GDNKYDAGEHGLQEAEKGVKFL | | |
| | | TLPPVLHLQLMRFMYDPQTDQN | | |
| | | IKINDRFEFPEQLPLDEFLQKT | | |
| | | DPKDPANYILHAVLVHSGDNHG | | |
| | | GHYVVYLNPKGDGKWCKFDDDV | | |
| | | VSRCTKEEAIEHNYGGHDDDLS | | |
| | | VRHCTNAYMLVYIRESKLSEVL | | |
| | | QAVTDHDIPQQLVERLQEEKRI | | |
| | | EAQKRKERQEAHLYMQVQIVAE | | |
| | | DQFCGHQGNDMYDEEKVKYTVF | | |
| | | KVLKNSSLAEFVQSLSQTMGFP | | |
| | | QDQIRLWPMQARSNGTKRPAML | | |
| | | DNEADGNKTMIELSDNENPWTI | | |
| | | FLETVDPELAASGATLPKFDKD | | |
| | | HDVMLFLKMYDPKTRSLNYCGH | | |
| | | IYTPISCKIRDLLPVMCDRAGF | | |
| | | IQDTSLILYEEVKPNLTERIQD | | |
| | | YDVSLDKALDELMDGDIIVFQK | | |
| | | DDPENDNSELPTAKEYFRDLYH | | |
| | | RVDVIFCDKTIPNDPGFVVTLS | | |
| | | NRMNYFQVAKTVAQRLNTDPML | | |
| | | LQFFKSQGYRDGPGNPLRHNYE | | |
| | | GTLRDLLQFFKPRQPKKLYYQQ | | |
| | | LKMKITDFENRRSFKCIWLNSQ | | |
| | | FREEEITLYPDKHGCVRDLLEE | | |
| | | CKKAVELGEKASGKLRLLEIVS | | |
| | | YKIIGVHQEDELLECLSPATSR | | |
| | | TFRIEEIPLDQVDIDKENEMLV | | |
| | | TVAHFHKEVFGTFGIPFLLRIH | | |
| | | QGEHFREVMKRIQSLLDIQEKE | | |
| | | FEKFKFAIVMMGRHQYINEDEY | | |
| | | EVNLKDFEPQPGNMSHPRPWLG | | |
| | | LDHFNKAPKRSRYTYLEKAIKI | | |
| | | HN | | |
| U17L5_HUMAN | 8 | MEDDSLYLRGEWQFNHFSKLTS | 120 | AVGAGLQNMGNTCYVNASLQ |
| Ubiquitin | | SRPDAAFAEIQRTSLPEKSPLS | | CLTYTPPLANYMLSREHSQT |
| carboxyl- | | CETRVDLCDDLAPVARQLAPRE | | CHRHKGCMLCTMQAHITRAL |
| terminal | | KLPLSSRRPAAVGAGLQNMGNT | | HNPGHVIQPSQALAAGFHRG |
| hydrolase | | CYVNASLQCLTYTPPLANYMLS | | KQEDAHEFLMFTVDAMKKAC |
| 17-like | | REHSQTCHRHKGCMLCTMQAHI | | LPGHKQVDHHSKDTTLIHQI |
| protein 5 | | TRALHNPGHVIQPSQALAAGFH | | FGGYWRSQIKCLHCHGISDT |
| | | RGKQEDAHEFLMFTVDAMKKAC | | FDPYLDIALDIQAAQSVQQA |
| | | LPGHKQVDHHSKDTTLIHQIFG | | LEQLAKPEELNGENAYHCGV |
| | | GYWRSQIKCLHCHGISDTFDPY | | CLQRAPASKTLTLHTSAKVL |
| | | LDIALDIQAAQSVQQALEQLAK | | ILVLKRFSDVTGNKIAKNVQ |
| | | PEELNGENAYHCGVCLQRAPAS | | YPECLDMQPYMSQPNTGPLV |
| | | KTLTLHTSAKVLILVLKRFSDV | | YVLYAVLVHAGWSCHNGHYF |
| | | TGNKIAKNVQYPECLDMQPYMS | | SYVKAQEGQWYKMDDAEVTA |
| | | QPNTGPLVYVLYAVLVHAGWSC | | SSITSVLSQQAYVLFYIQKS |
| | | HNGHYFSYVKAQEGQWYKMDDA | | EWERHSESVSRGREPRALGA |
| | | EVTASSITSVLSQQAYVLFYIQ | | EDTDRRATQGELKRDHPCLQ |
| | | KSEWERHSESVSRGREPRALGA | | APEL |
| | | EDTDRRATQGELKRDHPCLQAP | | |
| | | ELDEHLVERATQESTLDHWKFL | | |
| | | QEQNKTKPEFNVRKVEGTLPPD | | |
| | | VLVIHQSKYKCGMKNHHPEQQS | | |
| | | SLLNLSSSTPTHQESMNTGTLA | | |
| | | SLRGRARRSKGKNKHSKRALLV | | |
| | | CQ | | |
| U17LL_HUMAN | 9 | MEEDSLYLGGEWQFNHESKLTS | 121 | AVGAGLQNMGNTCYVNASLQ |
| Ubiquitin | | SRPDAAFAEIQRTSLPEKSPLS | | CLTYTPPLANYMLSREHSQT |
| carboxyl- | | CETRVDLCDDLAPVARQLAPRE | | CHRHKGCMLCTMQAHITRAL |
| terminal | | KLPLSNRRPAAVGAGLQNMGNT | | HNPGHVIQPSQALAAGFHRG |
| hydrolase | | CYVNASLQCLTYTPPLANYMLS | | KQEDAHEFLMFTVDAMKKAC |
| 17-like | | REHSQTCHRHKGCMLCTMQAHI | | LPGHKQVDHHSKDTTLIHQI |
| protein 21 | | TRALHNPGHVIQPSQALAAGFH | | FGGYWRSQIKCLHCHGISDT |
| | | RGKQEDAHEFLMFTVDAMKKAC | | FDPYLDIALDIQAAQSVQQA |
| | | LPGHKQVDHHSKDTTLIHQIFG | | LEQLVKPEELNGENAYHCGV |
| | | GYWRSQIKCLHCHGISDTFDPY | | CLQRAPASKMLTLLTSAKVL |
| | | LDIALDIQAAQSVQQALEQLVK | | ILVLKRFSDVTGNKIAKNVQ |
| | | PEELNGENAYHCGVCLQRAPAS | | YPECLDMQPYMSQPNTGPLV |
| | | KMLTLLTSAKVLILVLKRFSDV | | YVLYAVLVHAGWSCHNGHYF |
| | | TGNKIAKNVQYPECLDMQPYMS | | SYVKAQEGQWYKMDDAEVTA |
| | | QPNTGPLVYVLYAVLVHAGWSC | | SSITSVLSQQAYVLFYIQKS |
| | | HNGHYFSYVKAQEGQWYKMDDA | | EWERHSESVSRGREPRALGA |
| | | EVTASSITSVLSQQAYVLFYIQ | | EDTDRRATQGELKRDHPCLQ |
| | | KSEWERHSESVSRGREPRALGA | | APEL |
| | | EDTDRRATQGELKRDHPCLQAP | | |
| | | ELDEHLVERATQESTLDHWKFL | | |
| | | QEQNKTKPEFNVRKVEGTLPPD | | |
| | | VLVIHQSKYKCGMKNHHPEQQS | | |
| | | SLLNLSSSTPTHQESMNTGTLA | | |
| | | SLRGRARRSKGKNKHSKRALLV | | |
| | | CQ | | |
| U17LA_HUMAN | 10 | MEDDSLYLGGEWQFNHFSKLTS | 122 | AVGAGLQNMGNTCYVNASLQ |
| Ubiquitin | | SRPDAAFAEIQRTSLPEKSPLS | | CLTYKPPLANYMLFREHSQT |
| carboxyl- | | CETRVDLCDDLAPVARQLAPRE | | CHRHKGCMLCTMQAHITRAL |
| terminal | | KPPLSSRRPAAVGAGLQNMGNT | | HIPGHVIQPSQALAAGFHRG |
| hydrolase | | CYVNASLQCLTYKPPLANYMLF | | KQEDAHEFLMFTVDAMRKAC |
| 17-like | | REHSQTCHRHKGCMLCTMQAHI | | LPGHKQVDRHSKDTTLIHQI |
| protein 10 | | TRALHIPGHVIQPSQALAAGFH | | FGGYWRSQIKCLHCHGISDT |
| | | RGKQEDAHEFLMFTVDAMRKAC | | FDPYLDIALDIQAAQSVQQA |
| | | LPGHKQVDRHSKDTTLIHQIFG | | LEQLVKPEELNGENAYHCGV |
| | | GYWRSQIKCLHCHGISDTFDPY | | CLQRAPASKTLTLHNSAKVL |
| | | LDIALDIQAAQSVQQALEQLVK | | ILVLKRFPDVTGNKIAKNVQ |
| | | PEELNGENAYHCGVCLQRAPAS | | YPECLDMQPYMSQQNTGPLV |
| | | KTLTLHNSAKVLILVLKRFPDV | | YVLYAVLVHAGWSCHNGHYS |
| | | TGNKIAKNVQYPECLDMQPYMS | | SYVKAQEGQWYKMDDAEVTA |
| | | QQNTGPLVYVLYAVLVHAGWSC | | SSITSVLSQQAYVLFYIQKS |
| | | HNGHYSSYVKAQEGQWYKMDDA | | EWERHSESVSRGREPRALGV |
| | | EVTASSITSVLSQQAYVLFYIQ | | EDTDRRATQGELKRDHPCLQ |
| | | KSEWERHSESVSRGREPRALGV | | APEL |
| | | EDTDRRATQGELKRDHPCLQAP | | |
| | | ELDEHLVERATQESTLDHWKEF | | |
| | | QEQNKTKPEFNVRRVEGTVPPD | | |
| | | VLVIHQSKYKCRMKNHHPEQQS | | |
| | | SLLNLSSTTPTDQESMNTGTLA | | |
| | | SLRGRTRRSKGKNKHSKRALLV | | |
| | | CQ | | |
| UBP41_HUMAN | 11 | MDGVLFRAHQCQYVHPCVHVYV | 123 | WGLVGLHNIGQTCCLNSLIQ |
| Putative | | TVGLMDPLCERKEKASKQEREN | | VFVMNVDFARILKRITVPRG |
| ubiquitin | | PLAHLAAWGLVGLHNIGQTCCL | | ADEQRRSVPFQMLLLLEKMQ |
| carboxyl- | | NSLIQVFVMNVDFARILKRITV | | DSRQKAVWPLELAYCLQKYN |
| terminal | | PRGADEQRRSVPFQMLLLLEKM | | VPLFVQHDAAQLYLKLWNLI |
| hydrolase | | QDSRQKAVWPLELAYCLQKYNV | | KDQIADVHLVERLQALYMIR |
| 41 | | PLFVQHDAAQLYLKLWNLIKDQ | | MKDSLICLDCAMESSRNSSM |
| | | IADVHLVERLQALYMIRMKDSL | | LTLRLSFFDVDSKPLKTLED |
| | | ICLDCAMESSRNSSMLTLRLSF | | ALHCFFQPRELSSKSKCFCE |
| | | FDVDSKPLKTLEDALHCFFQPR | | NCGKKTRGKQVLKLTHLPQT |
| | | ELSSKSKCFCENCGKKTRGKQV | | LTIHLMRESIRNSQTRKICH |
| | | LKLTHLPQTLTIHLMRFSIRNS | | SLYFPQSLDESQILPMKRES |
| | | QTRKICHSLYFPQSLDFSQILP | | CDAEEQSGGQYELFAVIAHV |
| | | MKRESCDAEEQSGGQYELFAVI | | GMADSGHYCVYIRNAVDGKW |
| | | AHVGMADSGHYCVYIRNAVDGK | | FCFNDSNICLVSWEDIQCTY |
| | | WFCFNDSNICLVSWEDIQCTYG | | GNPNYHW |
| | | NPNYHW | | |
| UBP38_HUMAN | 12 | MDKILEGLVSSSHPLPLKRVIV | 124 | SETGKTGLINLGNTCYMNSV |
| Ubiquitin | | RKVVESAEHWLDEAQCEAMFDL | | IQALFMATDFRRQVLSLNLN |
| carboxyl- | | TTRLILEGQDPFQRQVGHQVLE | | GCNSLMKKLQHLFAFLAHTQ |
| terminal | | AYARYHRPEFESFFNKTFVLGL | | REAYAPRIFFEASRPPWFTP |
| hydrolase | | LHQGYHSLDRKDVAILDYIHNG | | RSQQDCSEYLRFLLDRLHEE |
| 38 | | LKLIMSCPSVLDLFSLLQVEVL | | EKILKVQASHKPSEILECSE |
| | | RMVCERPEPQLCARLSDLLTDF | | TSLQEVASKAAVLTETPRTS |
| | | VQCIPKGKLSITFCQQLVRTIG | | DGEKTLIEKMFGGKLRTHIR |
| | | HFQCVSTQERELREYVSQVTKV | | CLNCRSTSQKVEAFTDLSLA |
| | | SNLLQNIWKAEPATLLPSLQEV | | FCPSSSLENMSVQDPASSPS |
| | | FASISSTDASFEPSVALASLVQ | | IQDGGLMQASVPGPSEEPVV |
| | | HIPLQMITVLIRSLTTDPNVKD | | YNPTTAAFICDSLVNEKTIG |
| | | ASMTQALCRMIDWLSWPLAQHV | | SPPNEFYCSENTSVPNESNK |
| | | DTWVIALLKGLAAVQKFTILID | | ILVNKDVPQKPGGETTPSVT |
| | | VTLLKIELVFNRLWFPLVRPGA | | DLLNYFLAPEILTGDNQYYC |
| | | LAVLSHMLLSFQHSPEAFHLIV | | ENCASLQNAEKTMQITEEPE |
| | | PHVVNLVHSFKNDGLPSSTAFL | | YLILTLLRFSYDQKYHVRRK |
| | | VQLTELIHCMMYHYSGFPDLYE | | ILDNVSLPLVLELPVKRITS |
| | | PILEAIKDFPKPSEEKIKLILN | | FSSLSESWSVDVDFTDLSEN |
| | | QSAWTSQSNSLASCLSRLSGKS | | LAKKLKPSGTDEASCTKLVP |
| | | ETGKTGLINLGNTCYMNSVIQA | | YLLSSVVVHSGISSESGHYY |
| | | LFMATDFRRQVLSLNLNGCNSL | | SYARNITSTDSSYQMYHQSE |
| | | MKKLQHLFAFLAHTQREAYAPR | | ALALASSQSHLLGRDSPSAV |
| | | IFFEASRPPWFTPRSQQDCSEY | | FEQDLENKEMSKEWFLFNDS |
| | | LRFLLDRLHEEEKILKVQASHK | | RVTFTSFQSVQKITSRFPKD |
| | | PSEILECSETSLQEVASKAAVL | | TAYVLLYKKQH |
| | | TETPRTSDGEKTLIEKMFGGKL | | |
| | | RTHIRCLNCRSTSQKVEAFTDL | | |
| | | SLAFCPSSSLENMSVQDPASSP | | |
| | | SIQDGGLMQASVPGPSEEPVVY | | |
| | | NPTTAAFICDSLVNEKTIGSPP | | |
| | | NEFYCSENTSVPNESNKILVNK | | |
| | | DVPQKPGGETTPSVTDLLNYFL | | |
| | | APEILTGDNQYYCENCASLQNA | | |
| | | EKTMQITEEPEYLILTLLRFSY | | |
| | | DQKYHVRRKILDNVSLPLVLEL | | |
| | | PVKRITSFSSLSESWSVDVDFT | | |
| | | DLSENLAKKLKPSGTDEASCTK | | |
| | | LVPYLLSSVVVHSGISSESGHY | | |
| | | YSYARNITSTDSSYQMYHQSEA | | |
| | | LALASSQSHLLGRDSPSAVFEQ | | |
| | | DLENKEMSKEWFLFNDSRVTFT | | |
| | | SFQSVQKITSRFPKDTAYVLLY | | |
| | | KKQHSTNGLSGNNPTSGLWING | | |
| | | DPPLQKELMDAITKDNKLYLQE | | |
| | | QELNARARALQAASASCSFRPN | | |
| | | GFDDNDPPGSCGPTGGGGGGGF | | |
| | | NTVGRLVF | | |
| UBP43_HUMAN | 13 | MDLGPGDAAGGGPLAPRPRRRR | 125 | RPPGAQGLKNHGNTCFMNAV |
| Ubiquitin | | SLRRLFSRFLLALGSRSRPGDS | | VQCLSNTDLLAEFLALGRYR |
| carboxyl- | | PPRPQPGHCDGDGEGGFACAPG | | AAPGRAEVTEQLAALVRALW |
| terminal | | PVPAAPGSPGEERPPGPQPQLQ | | TREYTPQLSAEFKNAVSKYG |
| hydrolase | | LPAGDGARPPGAQGLKNHGNTC | | SQFQGNSQHDALEFLLWLLD |
| 43 | | FMNAVVQCLSNTDLLAEFLALG | | RVHEDLEGSSRGPVSEKLPP |
| | | RYRAAPGRAEVTEQLAALVRAL | | EATKTSENCLSPSAQLPLGQ |
| | | WTREYTPQLSAEFKNAVSKYGS | | SFVQSHFQAQYRSSLTCPHC |
| | | QFQGNSQHDALEFLLWLLDRVH | | LKQSNTFDPFLCVSLPIPLR |
| | | EDLEGSSRGPVSEKLPPEATKT | | QTRFLSVTLVFPSKSQRFLR |
| | | SENCLSPSAQLPLGQSFVQSHF | | VGLAVPILSTVAALRKMVAE |
| | | QAQYRSSLTCPHCLKQSNTFDP | | EGGVPADEVILVELYPSGFQ |
| | | FLCVSLPIPLRQTRFLSVTLVF | | RSFFDEEDLNTIAEGDNVYA |
| | | PSKSQRFLRVGLAVPILSTVAA | | FQVPPSPSQGTLSAHPLGLS |
| | | LRKMVAEEGGVPADEVILVELY | | ASPRLAAREGQRFSLSLHSE |
| | | PSGFQRSFFDEEDLNTIAEGDN | | SKVLILFCNLVGSGQQASRF |
| | | VYAFQVPPSPSQGTLSAHPLGL | | GPPFLIREDRAVSWAQLQQS |
| | | SASPRLAAREGQRFSLSLHSES | | ILSKVRHLMKSEAPVQNLGS |
| | | KVLILFCNLVGSGQQASRFGPP | | LFSIRVVGLSVACSYLSPKD |
| | | FLIREDRAVSWAQLQQSILSKV | | SRPLCHWAVDRVLHLRRPGG |
| | | RHLMKSEAPVQNLGSLFSIRVV | | PPHVKLAVEWDSSVKERLFG |
| | | GLSVACSYLSPKDSRPLCHWAV | | SLQEERAQDADSVWQQQQAH |
| | | DRVLHLRRPGGPPHVKLAVEWD | | QQHSCTLDECFQFYTKEEQL |
| | | SSVKERLFGSLQEERAQDADSV | | AQDDAWKCPHCQVLQQGMVK |
| | | WQQQQAHQQHSCTLDECFQFYT | | LSLWTLPDILIIHLKRFCQV |
| | | KEEQLAQDDAWKCPHCQVLQQG | | GERRNKLSTLVKFPLSGLNM |
| | | MVKLSLWTLPDILIIHLKRFCQ | | APHVAQRSTSPEAGLGPWPS |
| | | VGERRNKLSTLVKFPLSGLNMA | | WKQPDCLPTSYPLDFLYDLY |
| | | PHVAQRSTSPEAGLGPWPSWKQ | | AVCNHHGNLQGGHYTAYCRN |
| | | PDCLPTSYPLDFLYDLYAVCNH | | SLDGQWYSYDDSTVEPLRED |
| | | HGNLQGGHYTAYCRNSLDGQWY | | EVNTRGAYILFYQKRN |
| | | SYDDSTVEPLREDEVNTRGAYI | | |
| | | LFYQKRNSIPPWSASSSMRGST | | |
| | | SSSLSDHWLLRLGSHAGSTRGS | | |
| | | LLSWSSAPCPSLPQVPDSPIFT | | |
| | | NSLCNQEKGGLEPRRLVRGVKG | | |
| | | RSISMKAPTTSRAKQGPFKTMP | | |
| | | LRWSFGSKEKPPGASVELVEYL | | |
| | | ESRRRPRSTSQSIVSLLTGTAG | | |
| | | EDEKSASPRSNVALPANSEDGG | | |
| | | RAIERGPAGVPCPSAQPNHCLA | | |
| | | PGNSDGPNTARKLKENAGQDIK | | |
| | | LPRKFDLPLTVMPSVEHEKPAR | | |
| | | PEGQKAMNWKESFQMGSKSSPP | | |
| | | SPYMGFSGNSKDSRRGTSELDR | | |
| | | PLQGTLTLLRSVFRKKENRRNE | | |
| | | RAEVSPQVPPVSLVSGGLSPAM | | |
| | | DGQAPGSPPALRIPEGLARGLG | | |
| | | SRLERDVWSAPSSLRLPRKASR | | |
| | | APRGSALGMSQRTVPGEQASYG | | |
| | | TFQRVKYHTLSLGRKKTLPESS | | |
| | | F | | |
| UBP2_HUMAN | 14 | MSQLSSTLKRYTESARYTDAHY | 126 | SAQGLAGLRNLGNTCFMNSI |
| Ubiquitin | | AKSGYGAYTPSSYGANLAASLL | | LQCLSNTRELRDYCLQRLYM |
| carboxyl- | | EKEKLGFKPVPTSSFLTRPRTY | | RDLHHGSNAHTALVEEFAKL |
| terminal | | GPSSLLDYDRGRPLLRPDITGG | | IQTIWTSSPNDVVSPSEFKT |
| hydrolase | | GKRAESQTRGTERPLGSGLSGG | | QIQRYAPRFVGYNQQDAQEF |
| 2 | | SGFPYGVTNNCLSYLPINAYDQ | | LRFLLDGLHNEVNRVTLRPK |
| | | GVTLTQKLDSQSDLARDFSSLR | | SNPENLDHLPDDEKGRQMWR |
| | | TSDSYRIDPRNLGRSPMLARTR | | KYLEREDSRIGDLFVGQLKS |
| | | KELCTLQGLYQTASCPEYLVDY | | SLTCTDCGYCSTVFDPFWDL |
| | | LENYGRKGSASQVPSQAPPSRV | | SLPIAKRGYPEVTLMDCMRL |
| | | PEIISPTYRPIGRYTLWETGKG | | FTKEDVLDGDEKPTCCRCRG |
| | | QAPGPSRSSSPGRDGMNSKSAQ | | RKRCIKKESIQRFPKILVLH |
| | | GLAGLRNLGNTCFMNSILQCLS | | LKRFSESRIRTSKLTTFVNF |
| | | NTRELRDYCLQRLYMRDLHHGS | | PLRDLDLREFASENTNHAVY |
| | | NAHTALVEEFAKLIQTIWTSSP | | NLYAVSNHSGTTMGGHYTAY |
| | | NDVVSPSEFKTQIQRYAPRFVG | | CRSPGTGEWHTENDSSVTPM |
| | | YNQQDAQEFLRFLLDGLHNEVN | | SSSQVRTSDAYLLFYELAS |
| | | RVTLRPKSNPENLDHLPDDEKG | | |
| | | RQMWRKYLEREDSRIGDLFVGQ | | |
| | | LKSSLTCTDCGYCSTVFDPFWD | | |
| | | LSLPIAKRGYPEVTLMDCMRLF | | |
| | | TKEDVLDGDEKPTCCRCRGRKR | | |
| | | CIKKFSIQRFPKILVLHLKRFS | | |
| | | ESRIRTSKLTTFVNFPLRDLDL | | |
| | | REFASENTNHAVYNLYAVSNHS | | |
| | | GTTMGGHYTAYCRSPGTGEWHT | | |
| | | FNDSSVTPMSSSQVRTSDAYLL | | |
| | | FYELASPPSRM | | |
| UBP45_HUMAN | 15 | MRVKDPTKALPEKAKRSKRPTV | 127 | LSVRGITNLGNTCFFNAVMQ |
| Ubiquitin | | PHDEDSSDDIAVGLTCQHVSHA | | NLAQTYTLTDLMNEIKESST |
| carboxyl- | | ISVNHVKRAIAENLWSVCSECL | | KLKIFPSSDSQLDPLVVELS |
| terminal | | KERRFYDGQLVLTSDIWLCLKC | | RPGPLTSALFLFLHSMKETE |
| hydrolase | | GFQGCGKNSESQHSLKHFKSSR | | KGPLSPKVLFNQLCQKAPRF |
| 45 | | TEPHCIIINLSTWIIWCYECDE | | KDFQQQDSQELLHYLLDAVR |
| | | KLSTHCNKKVLAQIVDEFQKHA | | TEETKRIQASILKAFNNPTT |
| | | SKTQTSAFSRIMKLCEEKCETD | | KTADDETRKKVKAYGKEGVK |
| | | EIQKGGKCRNLSVRGITNLGNT | | MNFIDRIFIGELTSTVMCEE |
| | | CFFNAVMQNLAQTYTLTDLMNE | | CANISTVKDPFIDISLPIIE |
| | | IKESSTKLKIFPSSDSQLDPLV | | ERVSKPLLWGRMNKYRSLRE |
| | | VELSRPGPLTSALFLFLHSMKE | | TDHDRYSGNVTIENIHQPRA |
| | | TEKGPLSPKVLFNQLCQKAPRF | | AKKHSSSKDKSQLIHDRKCI |
| | | KDFQQQDSQELLHYLLDAVRTE | | RKLSSGETVTYQKNENLEMN |
| | | ETKRIQASILKAFNNPTTKTAD | | GDSLMFASLMNSESRLNESP |
| | | DETRKKVKAYGKEGVKMNFIDR | | TDDSEKEASHSESNVDADSE |
| | | IFIGELTSTVMCEECANISTVK | | PSESESASKQTGLFRSSSGS |
| | | DPFIDISLPIIEERVSKPLLWG | | GVQPDGPLYPLSAGKLLYTK |
| | | RMNKYRSLRETDHDRYSGNVTI | | ETDSGDKEMAEAISELRLSS |
| | | ENIHQPRAAKKHSSSKDKSQLI | | TVTGDQDFDRENQPLNISNN |
| | | HDRKCIRKLSSGETVTYQKNEN | | LCFLEGKHLRSYSPQNAFQT |
| | | LEMNGDSLMFASLMNSESRLNE | | LSQSYITTSKECSIQSCLYQ |
| | | SPTDDSEKEASHSESNVDADSE | | FTSMELLMGNNKLLCENCTK |
| | | PSESESASKQTGLFRSSSGSGV | | NKQKYQEETSFAEKKVEGVY |
| | | QPDGPLYPLSAGKLLYTKETDS | | TNARKQLLISAVPAVLILHL |
| | | GDKEMAEAISELRLSSTVTGDQ | | KRFHQAGLSLRKVNRHVDFP |
| | | DFDRENQPLNISNNLCFLEGKH | | LMLDLAPFCSATCKNASVGD |
| | | LRSYSPQNAFQTLSQSYITTSK | | KVLYGLYGIVEHSGSMREGH |
| | | ECSIQSCLYQFTSMELLMGNNK | | YTAYVKVRTPSRKLSEHNTK |
| | | LLCENCTKNKQKYQEETSFAEK | | KKNVPGLKAADNESAGQWVH |
| | | KVEGVYTNARKQLLISAVPAVL | | VSDTYLQVVPESRALSAQAY |
| | | ILHLKRFHQAGLSLRKVNRHVD | | LLFYERVL |
| | | FPLMLDLAPFCSATCKNASVGD | | |
| | | KVLYGLYGIVEHSGSMREGHYT | | |
| | | AYVKVRTPSRKLSEHNTKKKNV | | |
| | | PGLKAADNESAGQWVHVSDTYL | | |
| | | QVVPESRALSAQAYLLFYERVL | | |
| UBP32_HUMAN | 16 | MGAKESRIGFLSYEEALRRVTD | 128 | TEKGATGLSNLGNTCFMNSS |
| Ubiquitin | | VELKRLKDAFKRTCGLSYYMGQ | | IQCVSNTQPLTQYFISGRHL |
| carboxyl- | | HCFIREVLGDGVPPKVAEVIYC | | YELNRTNPIGMKGHMAKCYG |
| terminal | | SFGGTSKGLHFNNLIVGLVLLT | | DLVQELWSGTQKNVAPLKLR |
| hydrolase | | RGKDEEKAKYIFSLFSSESGNY | | WTIAKYAPRFNGFQQQDSQE |
| 32 | | VIREEMERMLHVVDGKVPDTLR | | LLAFLLDGLHEDLNRVHEKP |
| | | KCFSEGEKVNYEKFRNWLFLNK | | YVELKDSDGRPDWEVAAEAW |
| | | DAFTFSRWLLSGGVYVTLTDDS | | DNHLRRNRSIVVDLFHGQLR |
| | | DTPTFYQTLAGVTHLEESDIID | | SQVKCKTCGHISVRFDPFNF |
| | | LEKRYWLLKAQSRTGRFDLETF | | LSLPLPMDSYMHLEITVIKL |
| | | GPLVSPPIRPSLSEGLFNAFDE | | DGTTPVRYGLRLNMDEKYTG |
| | | NRDNHIDFKEISCGLSACCRGP | | LKKQLSDLCGLNSEQILLAE |
| | | LAERQKFCFKVFDVDRDGVLSR | | VHGSNIKNFPQDNQKVRLSV |
| | | VELRDMVVALLEVWKDNRTDDI | | SGFLCAFEIPVPVSPISASS |
| | | PELHMDLSDIVEGILNAHDTTK | | PTQTDFSSSPSTNEMFTLTT |
| | | MGHLTLEDYQIWSVKNVLANEF | | NGDLPRPIFIPNGMPNTVVP |
| | | LNLLFQVCHIVLGLRPATPEEE | | CGTEKNFTNGMVNGHMPSLP |
| | | GQIIRGWLERESRYGLQAGHNW | | DSPFTGYIIAVHRKMMRTEL |
| | | FIISMQWWQQWKEYVKYDANPV | | YFLSSQKNRPSLFGMPLIVP |
| | | VIEPSSVLNGGKYSFGTAAHPM | | CTVHTRKKDLYDAVWIQVSR |
| | | EQVEDRIGSSLSYVNTTEEKFS | | LASPLPPQEASNHAQDCDDS |
| | | DNISTASEASETAGSGFLYSAT | | MGYQYPFTLRVVQKDGNSCA |
| | | PGADVCFARQHNTSDNNNQCLL | | WCPWYRFCRGCKIDCGEDRA |
| | | GANGNILLHLNPQKPGAIDNQP | | FIGNAYIAVDWDPTALHLRY |
| | | LVTQEPVKATSLTLEGGRLKRT | | QTSQERVVDEHESVEQSRRA |
| | | PQLIHGRDYEMVPEPVWRALYH | | QAEPINLDSCLRAFTSEEEL |
| | | WYGANLALPRPVIKNSKTDIPE | | GENEMYYCSKCKTHCLATKK |
| | | LELFPRYLLFLRQQPATRTQQS | | LDLWRLPPILIIHLKRFQFV |
| | | NIWVNMGNVPSPNAPLKRVLAY | | NGRWIKSQKIVKFPRESFDP |
| | | TGCFSRMQTIKEIHEYLSQRLR | | SAFLVPRDPALCQHKPLTPQ |
| | | IKEEDMRLWLYNSENYLTLLDD | | GDELSEPRILAREVKKVDAQ |
| | | EDHKLEYLKIQDEQHLVIEVRN | | SSAGEEDVLLSKSPSSLSAN |
| | | KDMSWPEEMSFIANSSKIDRHK | | IISSPKGSPSSSRKSGTSCP |
| | | VPTEKGATGLSNLGNTCFMNSS | | SSKNSSPNSSPRTLGRSKGR |
| | | IQCVSNTQPLTQYFISGRHLYE | | LRLPQIGSKNKLSSSKENLD |
| | | LNRTNPIGMKGHMAKCYGDLVQ | | ASKENGAGQICELADALSRG |
| | | ELWSGTQKNVAPLKLRWTIAKY | | HVLGGSQPELVTPQDHEVAL |
| | | APRFNGFQQQDSQELLAFLLDG | | ANGFLYEHEACGNGYSNGQL |
| | | LHEDLNRVHEKPYVELKDSDGR | | GNHSEEDSTDDQREDTRIKP |
| | | PDWEVAAEAWDNHLRRNRSIVV | | IYNLYAISCHSGILGGGHYV |
| | | DLFHGQLRSQVKCKTCGHISVR | | TYAKNPNCKWYCYNDSSCKE |
| | | FDPFNFLSLPLPMDSYMHLEIT | | LHPDEIDTDSAYILFYEQQG |
| | | VIKLDGTTPVRYGLRLNMDEKY | | IDYAQFLPKTDGKKMADTSS |
| | | TGLKKQLSDLCGLNSEQILLAE | | MDEDFESDYKKYCVLQ |
| | | VHGSNIKNFPQDNQKVRLSVSG | | |
| | | FLCAFEIPVPVSPISASSPTQT | | |
| | | DFSSSPSTNEMFTLTINGDLPR | | |
| | | PIFIPNGMPNTVVPCGTEKNFT | | |
| | | NGMVNGHMPSLPDSPFTGYIIA | | |
| | | VHRKMMRTELYFLSSQKNRPSL | | |
| | | FGMPLIVPCTVHTRKKDLYDAV | | |
| | | WIQVSRLASPLPPQEASNHAQD | | |
| | | CDDSMGYQYPFTLRVVQKDGNS | | |
| | | CAWCPWYRFCRGCKIDCGEDRA | | |
| | | FIGNAYIAVDWDPTALHLRYQT | | |
| | | SQERVVDEHESVEQSRRAQAEP | | |
| | | INLDSCLRAFTSEEELGENEMY | | |
| | | YCSKCKTHCLATKKLDLWRLPP | | |
| | | ILIIHLKRFQFVNGRWIKSQKI | | |
| | | VKFPRESFDPSAFLVPRDPALC | | |
| | | QHKPLTPQGDELSEPRILAREV | | |
| | | KKVDAQSSAGEEDVLLSKSPSS | | |
| | | LSANIISSPKGSPSSSRKSGTS | | |
| | | CPSSKNSSPNSSPRTLGRSKGR | | |
| | | LRLPQIGSKNKLSSSKENLDAS | | |
| | | KENGAGQICELADALSRGHVLG | | |
| | | GSQPELVTPQDHEVALANGFLY | | |
| | | EHEACGNGYSNGQLGNHSEEDS | | |
| | | TDDQREDTRIKPIYNLYAISCH | | |
| | | SGILGGGHYVTYAKNPNCKWYC | | |
| | | YNDSSCKELHPDEIDTDSAYIL | | |
| | | FYEQQGIDYAQFLPKTDGKKMA | | |
| | | DTSSMDEDFESDYKKYCVLQ | | |
| U17L6_HUMAN | 17 | MEDDSLYLRGEWQFNHFSKLTS | 129 | AVGAGLQNMGNTCYVNASLQ |
| Ubiquitin | | SRPDAAFAEIQRTSLPEKSPLS | | CLTYTPPLANYMLSREHSQT |
| carboxyl- | | CETRVDLCDDLAPVARQLAPRE | | CHRHKGCMLCTMQAHITRAL |
| terminal | | KLPLSSRRPAAVGAGLQNMGNT | | HNPGHVIQPSQALAAGFHRG |
| hydrolase | | CYVNASLQCLTYTPPLANYMLS | | KQEDAHEFLMFTVDAMKKAC |
| 17-like | | REHSQTCHRHKGCMLCTMQAHI | | LPGHKQVDHHSKDTTLIHQI |
| protein 6 | | TRALHNPGHVIQPSQALAAGFH | | FGGYWRSQIKCLHCHGISDT |
| | | RGKQEDAHEFLMFTVDAMKKAC | | FDPYLDIALDIQAAQSVQQA |
| | | LPGHKQVDHHSKDTTLIHQIFG | | LEQLVKPEELNGENAYHCGV |
| | | GYWRSQIKCLHCHGISDTFDPY | | CLQRAPASKTLTLHTSAKVL |
| | | LDIALDIQAAQSVQQALEQLVK | | ILVLKRFSDVTGNKIAKNVQ |
| | | PEELNGENAYHCGVCLQRAPAS | | YPECLDMQPYMSQQNTGPLV |
| | | KTLTLHTSAKVLILVLKRFSDV | | YVLYAVLVHAGWSCHNGHYF |
| | | TGNKIAKNVQYPECLDMQPYMS | | SYVKAQEGQWYKMDDAEVTA |
| | | QQNTGPLVYVLYAVLVHAGWSC | | SSITSVLSQQAYVLFYIQKS |
| | | HNGHYFSYVKAQEGQWYKMDDA | | |
| | | EVTASSITSVLSQQAYVLFYIQ | | |
| | | KSEWERHSESVSRGREPRALGS | | |
| | | ED | | |
| UBP42_HUMAN | 18 | MTIVDKASESSDPSAYQNQPGS | 130 | RVGAGLQNLGNTCFANAALQ |
| Ubiquitin | | SEAVSPGDMDAGSASWGAVSSL | | CLTYTPPLANYMLSHEHSKT |
| carboxyl- | | NDVSNHTLSLGPVPGAVVYSSS | | CHAEGFCMMCTMQAHITQAL |
| terminal | | SVPDKSKPSPQKDQALGDGIAP | | SNPGDVIKPMFVINEMRRIA |
| hydrolase | | PQKVLFPSEKICLKWQQTHRVG | | RHFRFGNQEDAHEFLQYTVD |
| 42 | | AGLQNLGNTCFANAALQCLTYT | | AMQKACLNGSNKLDRHTQAT |
| | | PPLANYMLSHEHSKTCHAEGFC | | TLVCQIFGGYLRSRVKCLNC |
| | | MMCTMQAHITQALSNPGDVIKP | | KGVSDTFDPYLDITLEIKAA |
| | | MFVINEMRRIARHERFGNQEDA | | QSVNKALEQFVKPEQLDGEN |
| | | HEFLQYTVDAMQKACLNGSNKL | | SYKCSKCKKMVPASKRFTIH |
| | | DRHTQATTLVCQIFGGYLRSRV | | RSSNVLTLSLKRFANFTGGK |
| | | KCLNCKGVSDTFDPYLDITLEI | | IAKDVKYPEYLDIRPYMSQP |
| | | KAAQSVNKALEQFVKPEQLDGE | | NGEPIVYVLYAVLVHTGFNC |
| | | NSYKCSKCKKMVPASKRFTIHR | | HAGHYFCYIKASNGLWYQMN |
| | | SSNVLTLSLKRFANFTGGKIAK | | DSIVSTSDIRSVLSQQAYVL |
| | | DVKYPEYLDIRPYMSQPNGEPI | | FYIRSHDVKNGGE |
| | | VYVLYAVLVHTGFNCHAGHYFC | | |
| | | YIKASNGLWYQMNDSIVSTSDI | | |
| | | RSVLSQQAYVLFYIRSHDVKNG | | |
| | | GELTHPTHSPGQSSPRPVISQR | | |
| | | VVTNKQAAPGFIGPQLPSHMIK | | |
| | | NPPHLNGTGPLKDTPSSSMSSP | | |
| | | NGNSSVNRASPVNASASVQNWS | | |
| | | VNRSSVIPEHPKKQKITISIHN | | |
| | | KLPVRQCQSQPNLHSNSLENPT | | |
| | | KPVPSSTITNSAVQSTSNASTM | | |
| | | SVSSKVTKPIPRSESCSQPVMN | | |
| | | GKSKLNSSVLVPYGAESSEDSD | | |
| | | EESKGLGKENGIGTIVSSHSPG | | |
| | | QDAEDEEATPHELQEPMTLNGA | | |
| | | NSADSDSDPKENGLAPDGASCQ | | |
| | | GQPALHSENPFAKANGLPGKLM | | |
| | | PAPLLSLPEDKILETFRLSNKL | | |
| | | KGSTDEMSAPGAERGPPEDRDA | | |
| | | EPQPGSPAAESLEEPDAAAGLS | | |
| | | STKKAPPPRDPGTPATKEGAWE | | |
| | | AMAVAPEEPPPSAGEDIVGDTA | | |
| | | PPDLCDPGSLTGDASPLSQDAK | | |
| | | GMIAEGPRDSALAEAPEGLSPA | | |
| | | PPARSEEPCEQPLLVHPSGDHA | | |
| | | RDAQDPSQSLGAPEAAERPPAP | | |
| | | VLDMAPAGHPEGDAEPSPGERV | | |
| | | EDAAAPKAPGPSPAKEKIGSLR | | |
| | | KVDRGHYRSRRERSSSGEPARE | | |
| | | SRSKTEGHRHRRRRTCPRERDR | | |
| | | QDRHAPEHHPGHGDRLSPGERR | | |
| | | SLGRCSHHHSRHRSGVELDWVR | | |
| | | HHYTEGERGWGREKFYPDRPRW | | |
| | | DRCRYYHDRYALYAARDWKPFH | | |
| | | GGREHERAGLHERPHKDHNRGR | | |
| | | RGCEPARERERHRPSSPRAGAP | | |
| | | HALAPHPDRFSHDRTALVAGDN | | |
| | | CNLSDRFHEHENGKSRKRRHDS | | |
| | | VENSDSHVEKKARRSEQKDPLE | | |
| | | EPKAKKHKKSKKKKKSKDKHRD | | |
| | | RDSRHQQDSDLSAACSDADLHR | | |
| | | HKKKKKKKKRHSRKSEDFVKDS | | |
| | | ELHLPRVTSLETVAQFRRAQGG | | |
| | | FPLSGGPPLEGVGPFREKTKHL | | |
| | | RMESRDDRCRLFEYGQGKRRYL | | |
| | | ELGR | | |
| U17L7_HUMAN | 19 | MEDDSLYLGGDWQFNHFSKLTS | 131 | AVGAGLQKIGNTFYVNVSLQ |
| Inactive | | SRLDAAFAEIQRTSLSEKSPLS | | CLTYTLPLSNYMLSREDSQT |
| ubiquitin | | SETRFDLCDDLAPVARQLAPRE | | CHLHKCCMFCTMQAHITWAL |
| carboxyl- | | KLPLSSRRPAAVGAGLQKIGNT | | HSPGHVIQPSQVLAAGFHRG |
| terminal | | FYVNVSLQCLTYTLPLSNYMLS | | EQEDAHEFLMFTVDAMKKAC |
| hydrolase | | REDSQTCHLHKCCMFCTMQAHI | | LPGHKQLDHHSKDTTLIHQI |
| 17-like | | TWALHSPGHVIQPSQVLAAGFH | | FGAYWRSQIKYLHCHGVSDT |
| protein 7 | | RGEQEDAHEFLMFTVDAMKKAC | | FDPYLDIALDIQAAQSVKQA |
| | | LPGHKQLDHHSKDTTLIHQIFG | | LEQLVKPKELNGENAYHCGL |
| | | AYWRSQIKYLHCHGVSDTFDPY | | CLQKAPASKTLTLPTSAKVL |
| | | LDIALDIQAAQSVKQALEQLVK | | ILVLKRFSDVTGNKLAKNVQ |
| | | PKELNGENAYHCGLCLQKAPAS | | YPKCRDMQPYMSQQNTGPLV |
| | | KTLTLPTSAKVLILVLKRFSDV | | YVLYAVLVHAGWSCHNGHYF |
| | | TGNKLAKNVQYPKCRDMQPYMS | | SYVKAQEGQWYKMDDAEVTA |
| | | QQNTGPLVYVLYAVLVHAGWSC | | SGITSVLSQQAYVLFYIQKS |
| | | HNGHYFSYVKAQEGQWYKMDDA | | EWERHSESVSRGREPRALGA |
| | | EVTASGITSVLSQQAYVLFYIQ | | EDTDRPATQGELKRDHPCLQ |
| | | KSEWERHSESVSRGREPRALGA | | VPEL |
| | | EDTDRPATQGELKRDHPCLQVP | | |
| | | ELDEHLVERATQESTLDHWKFP | | |
| | | QEQNKTKPEFNVRKVEGTLPPN | | |
| | | VLVIHQSKYKCGMKNHHPEQQS | | |
| | | SLLNLSSTKPTDQESMNTGTLA | | |
| | | SLQGSTRRSKGNNKHSKRSLLV | | |
| | | CQ | | |
| U17LH_HUMAN | 20 | MEDDSLYLGGEWQFNHFSKLTS | 132 | AVGAGLQNMGNTCYVNASLQ |
| Ubiquitin | | SRPDAAFAEIQRTSLPEKSPLS | | CLTYTPPLANYMLSREHSQT |
| carboxyl- | | CETRVDLCDDLAPVARQLAPRE | | CHRHKGCMLCTMQAHITRAL |
| terminal | | KLPLSSRRPAAVGAGLQNMGNT | | HNPGHVIQPSQALAAGFHRG |
| hydrolase | | CYVNASLQCLTYTPPLANYMLS | | KQEDAHEFLMFTVDAMKKAC |
| 17-like | | REHSQTCHRHKGCMLCTMQAHI | | LPGHKQVDHHSKDTTLIHQI |
| protein 17 | | TRALHNPGHVIQPSQALAAGFH | | FGGYWRSQIKCLHCHGISDT |
| | | RGKQEDAHEFLMFTVDAMKKAC | | FDPYLDIALDIQAAQSVQQA |
| | | LPGHKQVDHHSKDTTLIHQIFG | | LEQLVKPEELNGENAYHCGV |
| | | GYWRSQIKCLHCHGISDTFDPY | | CLQRAPASKTLTLHTSAKVL |
| | | LDIALDIQAAQSVQQALEQLVK | | ILVLKRFSDVTGNKIAKNVQ |
| | | PEELNGENAYHCGVCLQRAPAS | | YPECLDMQPYMSQQNTGPLV |
| | | KTLTLHTSAKVLILVLKRFSDV | | YVLYAVLVHAGWSCHNGHYF |
| | | TGNKIAKNVQYPECLDMQPYMS | | SYVKAQEGQWYKMDDAEVTA |
| | | QQNTGPLVYVLYAVLVHAGWSC | | ASITSVLSQQAYVLFYIQKS |
| | | HNGHYFSYVKAQEGQWYKMDDA | | EWERHSESVSRGREPRALGA |
| | | EVTAASITSVLSQQAYVLFYIQ | | EDTDRRATQGELKRDHPCLQ |
| | | KSEWERHSESVSRGREPRALGA | | APEL |
| | | EDTDRRATQGELKRDHPCLQAP | | |
| | | ELDEHLVERATQESTLDHWKFL | | |
| | | QEQNKTKPEFNVRKVEGTLPPD | | |
| | | VLVIHQSKYKCGMKNHHPEQQS | | |
| | | SLLNLSSSTPTHQESMNTGTLA | | |
| | | SLRGRARRSKGKNKHSKRALLV | | |
| | | CQ | | |
| UBP13_HUMAN | 21 | MQRRGALFGMPGGSGGRKMAAG | 133 | YGPGYTGLKNLGNSCYLSSV |
| Ubiquitin | | DIGELLVPHMPTIRVPRSGDRV | | MQAIFSIPEFQRAYVGNLPR |
| carboxyl- | | YKNECAFSYDSPNSEGGLYVCM | | IFDYSPLDPTQDFNTQMTKL |
| terminal | | NTFLAFGREHVERHFRKTGQSV | | GHGLLSGQYSKPPVKSELIE |
| hydrolase | | YMHLKRHVREKVRGASGGALPK | | QVMKEEHKPQQNGISPRMFK |
| 13 | | RRNSKIFLDLDTDDDLNSDDYE | | AFVSKSHPEFSSNRQQDAQE |
| | | YEDEAKLVIFPDHYEIALPNIE | | FFLHLVNLVERNRIGSENPS |
| | | ELPALVTIACDAVLSSKSPYRK | | DVFRFLVEERIQCCQTRKVR |
| | | QDPDTWENELPVSKYANNLTQL | | YTERVDYLMQLPVAMEAATN |
| | | DNGVRIPPSGWKCARCDLRENL | | KDELIAYELTRREAEANRRP |
| | | WLNLTDGSVLCGKWFFDSSGGN | | LPELVRAKIPFSACLQAFSE |
| | | GHALEHYRDMGYPLAVKLGTIT | | PENVDDFWSSALQAKSAGVK |
| | | PDGADVYSFQEEEPVLDPHLAK | | TSRFASFPEYLVVQIKKFTF |
| | | HLAHFGIDMLHMHGTENGLQDN | | GLDWVPKKFDVSIDMPDLLD |
| | | DIKLRVSEWEVIQESGTKLKPM | | INHLRARGLQPGEEELPDIS |
| | | YGPGYTGLKNLGNSCYLSSVMQ | | PPIVIPDDSKDRLMNQLIDP |
| | | AIFSIPEFQRAYVGNLPRIFDY | | SDIDESSVMQLAEMGFPLEA |
| | | SPLDPTQDFNTQMTKLGHGLLS | | CRKAVYFTGNMGAEVAFNWI |
| | | GQYSKPPVKSELIEQVMKEEHK | | IVHMEEPDFAEPLTMPGYGG |
| | | PQQNGISPRMFKAFVSKSHPEF | | AASAGASVFGASGLDNQPPE |
| | | SSNRQQDAQEFFLHLVNLVERN | | EIVAIITSMGFQRNQAIQAL |
| | | RIGSENPSDVFRFLVEERIQCC | | RATNNNLERALDWIFSHPEF |
| | | QTRKVRYTERVDYLMQLPVAME | | EEDSDFVIEMENNANANIIS |
| | | AATNKDELIAYELTRREAEANR | | EAKPEGPRVKDGSGTYELFA |
| | | RPLPELVRAKIPFSACLQAFSE | | FISHMGTSTMSGHYICHIKK |
| | | PENVDDEWSSALQAKSAGVKTS | | EGRWVIYNDHKVCASERPPK |
| | | RFASFPEYLVVQIKKFTFGLDW | | DLGYMYFYRRIPS |
| | | VPKKFDVSIDMPDLLDINHLRA | | |
| | | RGLQPGEEELPDISPPIVIPDD | | |
| | | SKDRLMNQLIDPSDIDESSVMQ | | |
| | | LAEMGFPLEACRKAVYFTGNMG | | |
| | | AEVAFNWIIVHMEEPDFAEPLT | | |
| | | MPGYGGAASAGASVFGASGLDN | | |
| | | QPPEEIVAIITSMGFQRNQAIQ | | |
| | | ALRATNNNLERALDWIFSHPEF | | |
| | | EEDSDFVIEMENNANANIISEA | | |
| | | KPEGPRVKDGSGTYELFAFISH | | |
| | | MGTSTMSGHYICHIKKEGRWVI | | |
| | | YNDHKVCASERPPKDLGYMYFY | | |
| | | RRIPS | | |
| UBP11_HUMAN | 22 | MAVAPRLFGGLCFRFRDQNPEV | 134 | KGQPGICGLTNLGNTCFMNS |
| Ubiquitin | | AVEGRLPISHSCVGCRRERTAM | | ALQCLSNVPQLTEYFLNNCY |
| carboxyl- | | ATVAANPAAAAAAVAAAAAVTE | | LEELNFRNPLGMKGEIAEAY |
| terminal | | DREPQHEELPGLDSQWRQIENG | | ADLVKQAWSGHHRSIVPHVF |
| hydrolase | | ESGRERPLRAGESWFLVEKHWY | | KNKVGHFASQFLGYQQHDSQ |
| 11 | | KQWEAYVQGGDQDSSTFPGCIN | | ELLSFLLDGLHEDLNRVKKK |
| | | NATLFQDEINWRLKEGLVEGED | | EYVELCDAAGRPDQEVAQEA |
| | | YVLLPAAAWHYLVSWYGLEHGQ | | WQNHKRRNDSVIVDTFHGLF |
| | | PPIERKVIELPNIQKVEVYPVE | | KSTLVCPDCGNVSVTFDPFC |
| | | LLLVRHNDLGKSHTVQFSHTDS | | YLSVPLPISHKRVLEVFFIP |
| | | IGLVLRTARERELVEPQEDTRL | | MDPRRKPEQHRLVVPKKGKI |
| | | WAKNSEGSLDRLYDTHITVLDA | | SDLCVALSKHTGISPERMMV |
| | | ALETGQLIIMETRKKDGTWPSA | | ADVFSHRFYKLYQLEEPLSS |
| | | QLHVMNNNMSEEDEDFKGQPGI | | ILDRDDIFVYEVSGRIEAIE |
| | | CGLTNLGNTCFMNSALQCLSNV | | GSREDIVVPVYLRERTPARD |
| | | PQLTEYFLNNCYLEELNFRNPL | | YNNSYYGLMLFGHPLLVSVP |
| | | GMKGEIAEAYADLVKQAWSGHH | | RDRFTWEGLYNVLMYRLSRY |
| | | RSIVPHVFKNKVGHFASQFLGY | | VTKPNSDDEDDGDEKEDDEE |
| | | QQHDSQELLSFLLDGLHEDLNR | | DKDDVPGPSTGGSLRDPEPE |
| | | VKKKEYVELCDAAGRPDQEVAQ | | QAGPSSGVTNRCPFLLDNCL |
| | | EAWQNHKRRNDSVIVDTFHGLF | | GTSQWPPRRRRKQLFTLQTV |
| | | KSTLVCPDCGNVSVTFDPFCYL | | NSNGTSDRTTSPEEVHAQPY |
| | | SVPLPISHKRVLEVFFIPMDPR | | IAIDWEPEMKKRYYDEVEAE |
| | | RKPEQHRLVVPKKGKISDLCVA | | GYVKHDCVGYVMKKAPVRLQ |
| | | LSKHTGISPERMMVADVESHRF | | ECIELFTTVETLEKENPWYC |
| | | YKLYQLEEPLSSILDRDDIFVY | | PSCKQHQLATKKLDLWMLPE |
| | | EVSGRIEAIEGSREDIVVPVYL | | ILIIHLKRFSYTKESREKLD |
| | | RERTPARDYNNSYYGLMLFGHP | | TLVEFPIRDLDESFFVIQPQ |
| | | LLVSVPRDRFTWEGLYNVLMYR | | NESNPELYKYDLIAVSNHYG |
| | | LSRYVTKPNSDDEDDGDEKEDD | | GMRDGHYTTFACNKDSGQWH |
| | | EEDKDDVPGPSTGGSLRDPEPE | | YFDDNSVSPVNENQIESKAA |
| | | QAGPSSGVTNRCPFLLDNCLGT | | YVLFYQRQD |
| | | SQWPPRRRRKQLFTLQTVNSNG | | |
| | | TSDRTTSPEEVHAQPYIAIDWE | | |
| | | PEMKKRYYDEVEAEGYVKHDCV | | |
| | | GYVMKKAPVRLQECIELFTTVE | | |
| | | TLEKENPWYCPSCKQHQLATKK | | |
| | | LDLWMLPEILIIHLKRFSYTKF | | |
| | | SREKLDTLVEFPIRDLDFSEFV | | |
| | | IQPQNESNPELYKYDLIAVSNH | | |
| | | YGGMRDGHYTTFACNKDSGQWH | | |
| | | YFDDNSVSPVNENQIESKAAYV | | |
| | | LFYQRQDVARRLLSPAGSSGAP | | |
| | | ASPACSSPPSSEFMDVN | | |
| U17L1_HUMAN | 23 | MGDDSLYLGGEWQFNHESKLTS | 135 | AVGAGLQNMGNTCYENASLQ |
| Ubiquitin | | SRPDAAFAEIQRTSLPEKSPLS | | CLTYTLPLANYMLSREHSQT |
| carboxyl- | | SETRVDLCDDLAPVARQLAPRE | | CQRPKCCMLCTMQAHITWAL |
| terminal | | KLPLSSRRPAAVGAGLQNMGNT | | HSPGHVIQPSQALAAGFHRG |
| hydrolase | | CYENASLQCLTYTLPLANYMLS | | KQEDVHEFLMFTVDAMKKAC |
| 17-like | | REHSQTCQRPKCCMLCTMQAHI | | LPGHKQVDHHCKDTTLIHQI |
| protein 1 | | TWALHSPGHVIQPSQALAAGFH | | FGGCWRSQIKCLHCHGISDT |
| | | RGKQEDVHEFLMFTVDAMKKAC | | FDPYLDIALDIQAAQSVKQA |
| | | LPGHKQVDHHCKDTTLIHQIFG | | LEQLVKPEELNGENAYHCGL |
| | | GCWRSQIKCLHCHGISDTFDPY | | CLQRAPASNTLTLHTSAKVL |
| | | LDIALDIQAAQSVKQALEQLVK | | ILVLKRFSDVAGNKLAKNVQ |
| | | PEELNGENAYHCGLCLQRAPAS | | YPECLDMQPYMSQQNTGPLV |
| | | NTLTLHTSAKVLILVLKRFSDV | | YVLYAVLVHAGWSCHDGHYF |
| | | AGNKLAKNVQYPECLDMQPYMS | | SYVKAQEVQWYKMDDAEVTV |
| | | QQNTGPLVYVLYAVLVHAGWSC | | CSIISVLSQQAYVLFYIQKS |
| | | HDGHYFSYVKAQEVQWYKMDDA | | |
| | | EVTVCSIISVLSQQAYVLFYIQ | | |
| | | KSEWERHSESVSRGREPRALGA | | |
| | | EDTDRRAKQGELKRDHPCLQAP | | |
| | | ELDEHLVERATQESTLDHWKFL | | |
| | | QEQNKTKPEFNVGKVEGTLPPN | | |
| | | ALVIHQSKYKCGMKNHHPEQQS | | |
| | | SLLNLSSTTRTDQESMNTGTLA | | |
| | | SLQGRTRRAKGKNKHSKRALLV | | |
| | | CQ | | |
| UBP14_HUMAN | 24 | MPLYSVTVKWGKEKFEGVELNT | 136 | ASAMELPCGLTNLGNTCYMN |
| Ubiquitin | | DEPPMVFKAQLFALTGVQPARQ | | ATVQCIRSVPELKDALKRYA |
| carboxyl- | | KVMVKGGTLKDDDWGNIKIKNG | | GALRASGEMASAQYITAALR |
| terminal | | MTLLMMGSADALPEEPSAKTVF | | DLFDSMDKTSSSIPPIILLQ |
| hydrolase | | VEDMTEEQLASAMELPCGLTNL | | FLHMAFPQFAEKGEQGQYLQ |
| 14 | | GNTCYMNATVQCIRSVPELKDA | | QDANECWIQMMRVLQQKLEA |
| | | LKRYAGALRASGEMASAQYITA | | IEDDSVKETDSSSASAATPS |
| | | ALRDLFDSMDKTSSSIPPIILL | | KKKSLIDQFFGVEFETTMKC |
| | | QFLHMAFPQFAEKGEQGQYLQQ | | TESEEEEVTKGKENQLQLSC |
| | | DANECWIQMMRVLQQKLEAIED | | FINQEVKYLFTGLKLRLQEE |
| | | DSVKETDSSSASAATPSKKKSL | | ITKQSPTLQRNALYIKSSKI |
| | | IDQFFGVEFETTMKCTESEEEE | | SRLPAYLTIQMVRFFYKEKE |
| | | VTKGKENQLQLSCFINQEVKYL | | SVNAKVLKDVKFPLMLDMYE |
| | | FTGLKLRLQEEITKQSPTLQRN | | LCTPELQEKMVSFRSKFKDL |
| | | ALYIKSSKISRLPAYLTIQMVR | | EDKKVNQQPNTSDKKSSPQK |
| | | FFYKEKESVNAKVLKDVKFPLM | | EVKYEPFSFADDIGSNNCGY |
| | | LDMYELCTPELQEKMVSFRSKF | | YDLQAVLTHQGRSSSSGHYV |
| | | KDLEDKKVNQQPNTSDKKSSPQ | | SWVKRKQDEWIKFDDDKVSI |
| | | KEVKYEPFSFADDIGSNNCGYY | | VTPEDILRLSGGGDWHIAYV |
| | | DLQAVLTHQGRSSSSGHYVSWV | | LLYGPRR |
| | | KRKQDEWIKFDDDKVSIVTPED | | |
| | | ILRLSGGGDWHIAYVLLYGPRR | | |
| | | VEIMEEESEQ | | |
| Q13107\|UBP4 | 25 | MAEGGGCRERPDAETQKSELGP | 137 | SHIQPGLCGLGNLGNTCFMN |
| _HUMAN | | LMRTTLQRGAQWYLIDSRWFKQ | | SALQCLSNTAPLTDYFLKDE |
| Ubiquitin | | WKKYVGFDSWDMYNVGEHNLFP | | YEAEINRDNPLGMKGEIAEA |
| carboxyl- | | GPIDNSGLFSDPESQTLKEHLI | | YAELIKQMWSGRDAHVAPRM |
| terminal | | DELDYVLVPTEAWNKLLNWYGC | | FKTQVGRFAPQFSGYQQQDS |
| hydrolase | | VEGQQPIVRKVVEHGLFVKHCK | | QELLAFLLDGLHEDLNRVKK |
| 4 | | VEVYLLELKLCENSDPTNVLSC | | KPYLELKDANGRPDAVVAKE |
| | | HFSKADTIATIEKEMRKLFNIP | | AWENHRLRNDSVIVDTFHGL |
| | | AERETRLWNKYMSNTYEQLSKL | | FKSTLVCPECAKVSVTEDPF |
| | | DNTVQDAGLYQGQVLVIEPQNE | | CYLTLPLPLKKDRVMEVFLV |
| | | DGTWPRQTLQSKSSTAPSRNFT | | PADPHCRPTQYRVTVPLMGA |
| | | TSPKSSASPYSSVSASLIANGD | | VSDLCEALSRLSGIAAENMV |
| | | STSTCGMHSSGVSRGGSGFSAS | | VADVYNHRFHKIFQMDEGLN |
| | | YNCQEPPSSHIQPGLCGLGNLG | | HIMPRDDIFVYEVCSTSVDG |
| | | NTCFMNSALQCLSNTAPLTDYF | | SECVTLPVYFRERKSRPSST |
| | | LKDEYEAEINRDNPLGMKGEIA | | SSASALYGQPLLLSVPKHKL |
| | | EAYAELIKQMWSGRDAHVAPRM | | TLESLYQAVCDRISRYVKQP |
| | | FKTQVGRFAPQFSGYQQQDSQE | | LPDEFGSSPLEPGACNGSRN |
| | | LLAFLLDGLHEDLNRVKKKPYL | | SCEGEDEEEMEHQEEGKEQL |
| | | ELKDANGRPDAVVAKEAWENHR | | SETEGSGEDEPGNDPSETTQ |
| | | LRNDSVIVDTFHGLFKSTLVCP | | KKIKGQPCPKRLFTFSLVNS |
| | | ECAKVSVTFDPFCYLTLPLPLK | | YGTADINSLAADGKLLKLNS |
| | | KDRVMEVFLVPADPHCRPTQYR | | RSTLAMDWDSETRRLYYDEQ |
| | | VTVPLMGAVSDLCEALSRLSGI | | ESEAYEKHVSMLQPQKKKKT |
| | | AAENMVVADVYNHRFHKIFQMD | | TVALRDCIELFTTMETLGEH |
| | | EGLNHIMPRDDIFVYEVCSTSV | | DPWYCPNCKKHQQATKKFDL |
| | | DGSECVTLPVYFRERKSRPSST | | WSLPKILVVHLKRFSYNRYW |
| | | SSASALYGQPLLLSVPKHKLTL | | RDKLDTVVEFPIRGLNMSEF |
| | | ESLYQAVCDRISRYVKQPLPDE | | VCNLSARPYVYDLIAVSNHY |
| | | FGSSPLEPGACNGSRNSCEGED | | GAMGVGHYTAYAKNKLNGKW |
| | | EEEMEHQEEGKEQLSETEGSGE | | YYFDDSNVSLASEDQIVTKA |
| | | DEPGNDPSETTQKKIKGQPCPK | | AYVLFYQRRD |
| | | RLFTFSLVNSYGTADINSLAAD | | |
| | | GKLLKLNSRSTLAMDWDSETRR | | |
| | | LYYDEQESEAYEKHVSMLQPQK | | |
| | | KKKTTVALRDCIELFTTMETLG | | |
| | | EHDPWYCPNCKKHQQATKKFDL | | |
| | | WSLPKILVVHLKRFSYNRYWRD | | |
| | | KLDTVVEFPIRGLNMSEFVCNL | | |
| | | SARPYVYDLIAVSNHYGAMGVG | | |
| | | HYTAYAKNKLNGKWYYFDDSNV | | |
| | | SLASEDQIVTKAAYVLFYQRRD | | |
| | | DEFYKTPSLSSSGSSDGGTRPS | | |
| | | SSQQGFGDDEACSMDTN | | |
| UBP26_HUMAN | 26 | MAALFLRGFVQIGNCKTGISKS | 138 | KICHGLPNLGNTCYMNAVLQ |
| Ubiquitin | | KEAFIEAVERKKKDRLVLYFKS | | SLLSIPSFADDLLNQSFPWG |
| carboxyl- | | GKYSTFRLSDNIQNVVLKSYRG | | KIPLNALTMCLARLLFFKDT |
| terminal | | NQNHLHLTLQNNNGLFIEGLSS | | YNIEIKEMLLLNLKKAISAA |
| hydrolase | | TDAEQLKIFLDRVHQNEVQPPV | | AEIFHGNAQNDAHEFLAHCL |
| 26 | | RPGKGGSVFSSTTQKEINKTSF | | DQLKDNMEKLNTIWKPKSEF |
| | | HKVDEKSSSKSFEIAKGSGTGV | | GEDNFPKQVFADDPDTSGFS |
| | | LQRMPLLTSKLTLTCGELSENQ | | CPVITNFELELLHSIACKAC |
| | | HKKRKRMLSSSSEMNEEFLKEN | | GQVILKTELNNYLSINLPQR |
| | | NSVEYKKSKADCSRCVSYNREK | | IKAHPSSIQSTEDLFFGAEE |
| | | QLKLKELEENKKLECESSCIMN | | LEYKCAKCEHKTSVGVHSFS |
| | | ATGNPYLDDIGLLQALTEKMVL | | RLPRILIVHLKRYSLNEFCA |
| | | VFLLQQGYSDGYTKWDKLKLFF | | LKKNDQEVIISKYLKVSSHC |
| | | ELFPEKICHGLPNLGNTCYMNA | | NEGTRPPLPLSEDGEITDFQ |
| | | VLQSLLSIPSFADDLLNQSFPW | | LLKVIRKMTSGNISVSWPAT |
| | | GKIPLNALTMCLARLLFFKDTY | | KESKDILAPHIGSDKESEQK |
| | | NIEIKEMLLLNLKKAISAAAEI | | KGQTVFKGASRRQQQKYLGK |
| | | FHGNAQNDAHEFLAHCLDQLKD | | NSKPNELESVYSGDRAFIEK |
| | | NMEKLNTIWKPKSEFGEDNFPK | | EPLAHLMTYLEDTSLCQFHK |
| | | QVFADDPDTSGFSCPVITNFEL | | AGGKPASSPGTPLSKVDFQT |
| | | ELLHSIACKACGQVILKTELNN | | VPENPKRKKYVKTSKFVAFD |
| | | YLSINLPQRIKAHPSSIQSTFD | | RIINPTKDLYEDKNIRIPER |
| | | LFFGAEELEYKCAKCEHKTSVG | | FQKVSEQTQQCDGMRICEQA |
| | | VHSFSRLPRILIVHLKRYSLNE | | PQQALPQSFPKPGTQGHTKN |
| | | FCALKKNDQEVIISKYLKVSSH | | LLRPTKLNLQKSNRNSLLAL |
| | | CNEGTRPPLPLSEDGEITDFQL | | GSNKNPRNKDILDKIKSKAK |
| | | LKVIRKMTSGNISVSWPATKES | | ETKRNDDKGDHTYRLISVVS |
| | | KDILAPHIGSDKESEQKKGQTV | | HLGKTLKSGHYICDAYDFEK |
| | | FKGASRRQQQKYLGKNSKPNEL | | QIWFTYDDMRVLGIQEAQMQ |
| | | ESVYSGDRAFIEKEPLAHLMTY | | EDRRCTGYIFFYMHN |
| | | LEDTSLCQFHKAGGKPASSPGT | | |
| | | PLSKVDFQTVPENPKRKKYVKT | | |
| | | SKFVAFDRIINPTKDLYEDKNI | | |
| | | RIPERFQKVSEQTQQCDGMRIC | | |
| | | EQAPQQALPQSFPKPGTQGHTK | | |
| | | NLLRPTKLNLQKSNRNSLLALG | | |
| | | SNKNPRNKDILDKIKSKAKETK | | |
| | | RNDDKGDHTYRLISVVSHLGKT | | |
| | | LKSGHYICDAYDFEKQIWFTYD | | |
| | | DMRVLGIQEAQMQEDRRCTGYI | | |
| | | FFYMHNEIFEEMLKREENAQLN | | |
| | | SKEVEETLQKE | | |
| UBP19_HUMAN | 27 | MSGGASATGPRRGPPGLEDTTS | 139 | LPGFTGLVNLGNTCFMNSVI |
| Ubiquitin | | KKKQKDRANQESKDGDPRKETG | | QSLSNTRELRDFFHDRSFEA |
| carboxyl- | | SRYVAQAGLEPLASGDPSASAS | | EINYNNPLGTGGRLAIGFAV |
| terminal | | HAAGITGSRHRTRLFFPSSSGS | | LLRALWKGTHHAFQPSKLKA |
| hydrolase | | ASTPQEEQTKEGACEDPHDLLA | | IVASKASQFTGYAQHDAQEF |
| 19 | | TPTPELLLDWRQSAEEVIVKLR | | MAFLLDGLHEDLNRIQNKPY |
| | | VGVGPLQLEDVDAAFTDTDCVV | | TETVDSDGRPDEVVAEEAWQ |
| | | RFAGGQQWGGVFYAEIKSSCAK | | RHKMRNDSFIVDLFQGQYKS |
| | | VQTRKGSLLHLTLPKKVPMLTW | | KLVCPVCAKVSITFDPFLYL |
| | | PSLLVEADEQLCIPPLNSQTCL | | PVPLPQKQKVLPVFYFAREP |
| | | LGSEENLAPLAGEKAVPPGNDP | | HSKPIKFLVSVSKENSTASE |
| | | VSPAMVRSRNPGKDDCAKEEMA | | VLDSLSQSVHVKPENLRLAE |
| | | VAADAATLVDEPESMVNLAFVK | | VIKNRFHRVELPSHSLDTVS |
| | | NDSYEKGPDSVVVHVYVKEICR | | PSDTLLCFELLSSELAKERV |
| | | DTSRVLFREQDETLIFQTRDGN | | VVLEVQQRPQVPSVPISKCA |
| | | FLRLHPGCGPHTTFRWQVKLRN | | ACQRKQQSEDEKLKRCTRCY |
| | | LIEPEQCTFCFTASRIDICLRK | | RVGYCNQLCQKTHWPDHKGL |
| | | RQSQRWGGLEAPAARVGGAKVA | | CRPENIGYPFLVSVPASRLT |
| | | VPTGPTPLDSTPPGGAPHPLTG | | YARLAQLLEGYARYSVSVFQ |
| | | QEEARAVEKDKSKARSEDTGLD | | PPFQPGRMALESQSPGCTTL |
| | | SVATRTPMEHVTPKPETHLASP | | LSTGSLEAGDSERDPIQPPE |
| | | KPTCMVPPMPHSPVSGDSVEEE | | LQLVTPMAEGDTGLPRVWAA |
| | | EEEEKKVCLPGFTGLVNLGNTC | | PDRGPVPSTSGISSEMLASG |
| | | FMNSVIQSLSNTRELRDFFHDR | | PIEVGSLPAGERVSRPEAAV |
| | | SFEAEINYNNPLGTGGRLAIGF | | PGYQHPSEAMNAHTPQFFIY |
| | | AVLLRALWKGTHHAFQPSKLKA | | KIDSSNREQRLEDKGDTPLE |
| | | IVASKASQFTGYAQHDAQEFMA | | LGDDCSLA |
| | | FLLDGLHEDLNRIQNKPYTETV | | LVWRNNERLQEFVLVASKEL |
| | | DSDGRPDEVVAEEAWQRHKMRN | | ECAEDPGSAGEAARAGHFTL |
| | | DSFIVDLFQGQYKSKLVCPVCA | | DQCLNLFTRPEVLAPEEAWY |
| | | KVSITFDPFLYLPVPLPQKQKV | | CPQCKQHREASKQLLLWRLP |
| | | LPVFYFAREPHSKPIKFLVSVS | | NVLIVQLKRFSFRSFIWRDK |
| | | KENSTASEVLDSLSQSVHVKPE | | INDLVEFPVRNLDLSKFCIG |
| | | NLRLAEVIKNRFHRVFLPSHSL | | QKEEQLPSYDLYAVINHYGG |
| | | DTVSPSDTLLCFELLSSELAKE | | MIGGHYTACARLPNDRSSQR |
| | | RVVVLEVQQRPQVPSVPISKCA | | SDVGWRLFDDSTVTTVDESQ |
| | | ACQRKQQSEDEKLKRCTRCYRV | | VVTRYAYVLFYRRRN |
| | | GYCNQLCQKTHWPDHKGLCRPE | | |
| | | NIGYPFLVSVPASRLTYARLAQ | | |
| | | LLEGYARYSVSVFQPPFQPGRM | | |
| | | ALESQSPGCTTLLSTGSLEAGD | | |
| | | SERDPIQPPELQLVTPMAEGDT | | |
| | | GLPRVWAAPDRGPVPSTSGISS | | |
| | | EMLASGPIEVGSLPAGERVSRP | | |
| | | EAAVPGYQHPSEAMNAHTPQFF | | |
| | | IYKIDSSNREQRLEDKGDTPLE | | |
| | | LGDDCSLALVWRNNERLQEFVL | | |
| | | VASKELECAEDPGSAGEAARAG | | |
| | | HFTLDQCLNLFTRPEVLAPEEA | | |
| | | WYCPQCKQHREASKQLLLWRLP | | |
| | | NVLIVQLKRFSFRSFIWRDKIN | | |
| | | DLVEFPVRNLDLSKFCIGQKEE | | |
| | | QLPSYDLYAVINHYGGMIGGHY | | |
| | | TACARLPNDRSSQRSDVGWRLF | | |
| | | DDSTVTTVDESQVVTRYAYVLF | | |
| | | YRRRNSPVERPPRAGHSEHHPD | | |
| | | LGPAAEAAASQASRIWQELEAE | | |
| | | EEPVPEGSGPLGPWGPQDWVGP | | |
| | | LPRGPTTPDEGCLRYFVLGTVA | | |
| | | ALVALVLNVFYPLVSQSRWR | | |
| UBP10_HUMAN | 28 | MALHSPQYIFGDFSPDEFNQFF | 140 | SLQPRGLINKGNWCYINATL |
| Ubiquitin | | VTPRSSVELPPYSGTVLCGTQA | | QALVACPPMYHLMKFIPLYS |
| carboxyl- | | VDKLPDGQEYQRIEFGVDEVIE | | KVQRPCTSTPMIDSFVRLMN |
| terminal | | PSDTLPRTPSYSISSTLNPQAP | | EFTNMPVPPKPRQALGDKIV |
| hydrolase | | EFILGCTASKITPDGITKEASY | | RDIRPGAAFEPTYIYRLLTV |
| 10 | | GSIDCQYPGSALALDGSSNVEA | | NKSSLSEKGRQEDAEEYLGF |
| | | EVLENDGVSGGLGQRERKKKKK | | ILNGLHEEMLNLKKLLSPSN |
| | | RPPGYYSYLKDGGDDSISTEAL | | EKLTISNGPKNHSVNEEEQE |
| | | VNGHANSAVPNSVSAEDAEFMG | | EQGEGSEDEWEQVGPRNKTS |
| | | DMPPSVTPRTCNSPQNSTDSVS | | VTRQADFVQTPITGIFGGHI |
| | | DIVPDSPFPGALGSDTRTAGQP | | RSVVYQQSSKESATLQPFFT |
| | | EGGPGADFGQSCFPAEAGRDTL | | LQLDIQSDKIRTVQDALESL |
| | | SRTAGAQPCVGTDTTENLGVAN | | VARESVQGYTTKTKQEVEIS |
| | | GQILESSGEGTATN | | RRVTLEKLPPVLVLHLKRFV |
| | | GVELHTTESIDLDPTKPESASP | | YEKTGGCQKLIKNIEYPVDL |
| | | PADGTGSASGTLPVSQPKSWAS | | EISKELLSPGVKNKNFKCHR |
| | | LFHDSKPSSSSPVAYVETKYSP | | TYRLFAVVYHHGNSATGGHY |
| | | PAISPLVSEKQVEVKEGLVPVS | | TTDVFQIGLNGWLRIDDQTV |
| | | EDPVAIKIAELLENVTLIHKPV | | KVINQYQVVKPTAERTAYLL |
| | | SLQPRGLINKGNWCYINATLQA | | YYRRVD |
| | | LVACPPMYHLMKFIPLYSKVQR | | |
| | | PCTSTPMIDSFVRLMNEFTNMP | | |
| | | VPPKPRQALGDKIVRDIRPGAA | | |
| | | FEPTYIYRLLTVNKSSLSEKGR | | |
| | | QEDAEEYLGFILNGLHEEMLNL | | |
| | | KKLLSPSNEKLTISNGPKNHSV | | |
| | | NEEEQEEQGEGSEDEWEQVGPR | | |
| | | NKTSVTRQADFVQT | | |
| | | PITGIFGGHIRSVVYQQSSKES | | |
| | | ATLQPFFTLQLDIQSDKIRTVQ | | |
| | | DALESLVARESVQGYTTKTKQE | | |
| | | VEISRRVTLEKLPPVLVLHLKR | | |
| | | FVYEKTGGCQKLIKNIEYPVDL | | |
| | | EISKELLSPGVKNKNFKCHRTY | | |
| | | RLFAVVYHHGNSATGGHYTTDV | | |
| | | FQIGLNGWLRIDDQTVKVINQY | | |
| | | QVVKPTAERTAYLLYYRRVDLL | | |
| UBP49_HUMAN | 29 | MDRCKHVGRLRLAQDHSILNPQ | 141 | MDRCKHVGRLRLAQDHSILN |
| Ubiquitin | | KWCCLECATTESVWACLKCSHV | | PQKWCCLECATTESVWACLK |
| carboxyl- | | ACGRYIEDHALKHFEETGHPLA | | CSHVACGRYIEDHALKHFEE |
| terminal | | MEVRDLYVFCYLCKDYVLNDNP | | TGHPLAMEVRDLYVFCYLCK |
| hydrolase | | EGDLKLLRSSLLAVRGQKQDTP | | DYVLNDNPEGDLKLLRSSLL |
| 49 | | VRRGRTLRSMASGEDVVLPQRA | | AVRGQKQDTPVRRGRTLRSM |
| | | PQGQPQMLTALWYRRQRLLART | | ASGEDVVLPQRAPQGQPQML |
| | | LRLWFEKSSRGQAKLEQRRQEE | | TALWYRRQRLLARTLRLWFE |
| | | ALERKKEEARRRRREVKRRLLE | | KSSRGQAKLEQRRQEEALER |
| | | ELASTPPRKSARLLLHTPRDAG | | KKEEARRRRREVKRRLLEEL |
| | | PAASRPAALPTSRRVPAATLKL | | ASTPPRKSARLLLHTPRDAG |
| | | RRQPAMAPGVTGLRNLGNTCYM | | PAASRPAALPTSRRVPAATL |
| | | NSILQVLSHLQKFRECFLNLDP | | KLRRQPAMAPGVTGLRNLGN |
| | | SKTEHLFPKATNGK | | TCYMNSILQVLSHLQKFREC |
| | | TQLSGKPTNSSATELSLRNDRA | | FLNLDPSKTEHLFPKATNGK |
| | | EACEREGFCWNGRASISRSLEL | | TQLSGKPTNSSATELSLRND |
| | | IQNKEPSSKHISLCRELHTLFR | | RAEACEREGFCWNGRASISR |
| | | VMWSGKWALVSPFAMLHSVWSL | | SLELIQNKEPSSKHISLCRE |
| | | IPAFRGYDQQDAQEFLCELLHK | | LHTLFRVMWSGKWALVSPFA |
| | | VQQELESEGTTRRILIPFSQRK | | MLHSVWSLIPAFRGYDQQDA |
| | | LTKQVLKVVNTIFHGQLLSQVT | | QEFLCELLHKVQQELESEGT |
| | | CISCNYKSNTIEPFWDLSLEFP | | TRRILIPFSQRKLTKQVLKV |
| | | ERYHCIEKGFVPLNQTECLLTE | | VNTIFHGQLLSQVTCISCNY |
| | | MLAKFTETEALEGRIYACDQCN | | KSNTIEPFWDLSLEFPERYH |
| | | SKRRKSNPKPLVLSEARKQLMI | | CIEKGFVPLNQTECLLTEML |
| | | YRLPQVLRLHLKRFRWSGRNHR | | AKFTETEALEGRIYACDQCN |
| | | EKIGVHVVFDQVLTMEPYCCRD | | SKRRKSNPKPLVLSEARKQL |
| | | MLSSLDKETFAYDL | | MIYRLPQVLRLHLKRFRWSG |
| | | SAVVMHHGKGFGSGHYTAYCYN | | RNHREKIGVHVVFDQVLTME |
| | | TEGGFWVHCNDSKLNVCSVEEV | | PYCCRDMLSSLDKETFAYDL |
| | | CKTQAYILFYTQRTVQGNARIS | | SAVVMHHGKGFGSGHYTAYC |
| | | ETHLQAQVQSSNNDEGRPQTFS | | YNTEGGFWVHCNDSKLNVCS |
| | | | | VEEVCKTQAYILFYTQRT |
| U17L8_HUMAN | 30 | MEDDSLYLGGEWQFNHFSKLTS | 142 | AVGAGLQNMGNTCYLNASLQ |
| Inactive | | PRPDAAFAEIQRTSLPEKSPLS | | CLTYTPPLANYMLSREHSQT |
| ubiquitin | | SETRVDLCDDLAPVARQLAPRE | | CQRPKCCMLCTMQAHITWAL |
| carboxyl- | | KLPLSSRRPAAVGAGLQNMGNT | | HSPGHVIQPSQALAAGFHRG |
| terminal | | CYLNASLQCLTYTPPLANYMLS | | KQEDAHEFLMFTVDAMKKAC |
| hydrolase | | REHSQTCQRPKCCMLCTMQAHI | | LPGHKQVDHHSKDTTLIHQI |
| 17-like | | TWALHSPGHVIQPSQALAAGFH | | FGGCWRSQIKCLHCHGISDT |
| protein 8 | | RGKQEDAHEFLMFTVDAMKKAC | | FDPYLDIALDIQAAQSVKQA |
| | | LPGHKQVDHHSKDTTLIHQIFG | | LEQLVKPEELNGENAYPCGL |
| | | GCWRSQIKCLHCHGISDTFDPY | | CLQRAPASNTLTLHTSAKVL |
| | | LDIALDIQAAQSVKQALEQLVK | | ILVLKRFCDVTGNKLAKNVQ |
| | | PEELNGENAYPCGLCLQRAPAS | | YPECLDMQPYMSQQNTGPLV |
| | | NTLTLHTSAKVLILVLKRFCDV | | YVLYAVLVHAGWSCHNGYYF |
| | | TGNKLAKNVQYPEC | | SYVKAQEGQWYKMDDAEVTA |
| | | LDMQPYMSQQNTGPLVYVLYAV | | CSITSVLSQQAYVLFYIQKS |
| | | LVHAGWSCHNGYYFSYVKAQEG | | |
| | | QWYKMDDAEVTACSITSVLSQQ | | |
| | | AYVLFYIQKSEWERHSESVSRG | | |
| | | REPRALGAEDTDRPATQGELKR | | |
| | | DHPCLQVPELDEHLVERATEES | | |
| | | TLDHWKFPQEQNKMKPEFNVRK | | |
| | | VEGTLPPNVLVIHQSKYKCGMK | | |
| | | NHHPEQQSSLLNLSSMNSTDQE | | |
| | | SMNTGTLASLQGRTRRSKGKNK | | |
| | | HSKRSLLVCQ | | |
| 6VN6_1 | 31 | GSKKHTGYVGLKNQGATCYMNS | 143 | TGYVGLKNQGATCYMNSLLQ |
| | | LLQTLFFTNQLRKAVYMMPTEG | | TLFFTNQLRKAVYMMPTEGD |
| | | DDSSKSVPLALQRVFYELQHSD | | DSSKSVPLALQRVFYELQHS |
| | | KPVGTKKLTKSFGWETLDSFMQ | | DKPVGTKKLTKSFGWETLDS |
| | | HDVQELCRVLLDNVENKMKGTC | | FMQHDVQELCRVLLDNVENK |
| | | VEGTIPKLFRGKMVSYIQCKEV | | MKGTCVEGTIPKLFRGKMVS |
| | | DYRSDRREDYYDIQLSIKGKKN | | YIQCKEVDYRSDRREDYYDI |
| | | IFESFVDYVAVEQLDGDNKYDA | | QLSIKGKKNIFESFVDYVAV |
| | | GEHGLQEAEKGVKFLTLPPVLH | | EQLDGDNKYDAGEHGLQEAE |
| | | LQLMRFMYDPQTDQNIKINDRF | | KGVKFLTLPPVLHLQLMRFM |
| | | EFPEQLPLDEFLQKTDPKDPAN | | YDPQTDQNIKINDRFEFPEQ |
| | | YILHAVLVHSGDNHGGHYVVYL | | LPLDEFLQKTDPKDPANYIL |
| | | NPKGDGKWCKFDDDVVSRCTKE | | HAVLVHSGDNHGGHYVVYLN |
| | | EAIEHNYGGHDDDLSVRHCTNA | | PKGDGKWCKFDDDVVSRCTK |
| | | YMLVYIRESKLSEVLQAVTDHD | | EEAIEHNYGGHDDDLSVRHC |
| | | IPQQLVERLQEEKRIEAQKR | | TNAYMLVYIRE |
| 6DGF_1 | 32 | AQGLAGLRNLGNTCFMNSILQC | 144 | AQGLAGLRNLGNTCFMNSIL |
| | | LSNTRELRDYCLQRLYMRDLHH | | QCLSNTRELRDYCLQRLYMR |
| | | GSNAHTALVEEFAKLIQTIWTS | | DLHHGSNAHTALVEEFAKLI |
| | | SPNDVVSPSEFKTQIQRYAPRF | | QTIWTSSPNDVVSPSEFKTQ |
| | | VGYNQQDAQEFLRFLLDGLHNE | | IQRYAPRFVGYNQQDAQEFL |
| | | VNRVTLRPKSNPENLDHLPDDE | | RFLLDGLHNEVNRVTLRPKS |
| | | KGRQMWRKYLEREDSRIGDLFV | | NPENLDHLPDDEKGRQMWRK |
| | | GQLKSSLTCTDCGYCSTVEDPF | | YLEREDSRIGDLFVGQLKSS |
| | | WDLSLPIAKRGYPEVTLMDCMR | | LTCTDCGYCSTVFDPFWDLS |
| | | LFTKEDVLDGDEKPTCCRCRGR | | LPIAKRGYPEVTLMDCMRLF |
| | | KRCIKKFSIQRFPKILVLHLKR | | TKEDVLDGDEKPTCCRCRGR |
| | | FSESRIRTSKLTTFVNFPLRDL | | KRCIKKFSIQRFPKILVLHL |
| | | DLREFASENTNHAVYNLYAVSN | | KRFSESRIRTSKLTTFVNFP |
| | | HSGTTMGGHYTAYCRSPGTGEW | | LRDLDLREFASENTNHAVYN |
| | | HTFNDSSVTPMSSSQVRTSDAY | | LYAVSNHSGTTMGGHYTAYC |
| | | LLFYELASPPSRM | | RSPGTGEWHTFNDSSVTPMS |
| | | | | SSQVRTSDAYLLFYELAS |
| 2VHF_1 | 33 | GLEIMIGKKKGIQGHYNSCYLD | 145 | MIGKKKGIQGHYNSCYLDST |
| | | STLFCLFAFSSVLDTVLLRPKE | | LFCLFAFSSVLDTVLLRPKE |
| | | KNDVEYYSETQELLRTEIVNPL | | KNDVEYYSETQELLRTEIVN |
| | | RIYGYVCATKIMKLRKILEKVE | | PLRIYGYVCATKIMKLRKIL |
| | | AASGFTSEEKDPEEFLNILFHH | | EKVEAASGFTSEEKDPEEFL |
| | | ILRVEPLLKIRSAGQKVQDCYF | | NILFHHILRVEPLLKIRSAG |
| | | YQIFMEKNEKVGVPTIQQLLEW | | QKVQDCYFYQIFMEKNEKVG |
| | | SFINSNLKFAEAPSCLIIQMPR | | VPTIQQLLEWSFINSNLKFA |
| | | FGKDFKLFKKIFPSLELNITDL | | EAPSCLIIQMPRFGKDEKLF |
| | | LEDTPRQCRICGGLAMYECREC | | KKIFPSLELNITDLLEDTPR |
| | | YDDPDISAGKIKQFCKTCNTQV | | QCRICGGLAMYECRECYDDP |
| | | HLHPKRLNHKYNPVSLPKDLPD | | DISAGKIKQFCKTCNTQVHL |
| | | WDWRHGCIPCQNMELFAVLCIE | | HPKRLNHKYNPVSLPKDLPD |
| | | TSHYVAFVKYGKDDSAWLFFDS | | WDWRHGCIPCQNMELFAVLC |
| | | MADRDGGQNGFNIPQVTPCPEV | | IETSHYVAFVKYGKDDSAWL |
| | | GEYLKMSLEDLHSLDSRRIQGC | | FFDSMADRDGGQNGFNIPQV |
| | | ARRLLCDAYMCMYQSPTMSLYK | | TPCPEVGEYLKMSLEDLHSL |
| | | | | DSRRIQGCARRLLCDAYMCM |
| | | | | YQS |
| U17LI_HUMAN | 34 | MEDDSLYLGGEWQFNHFSKLTS | 146 | AVGAGLQNMGNTCYVNASLQ |
| Ubiquitin | | SRPDAAFAEIQRTSLPEKSPLS | | CLTYTPPLANYMLSREHSQT |
| carboxyl- | | CETRVDLCDDLAPVARQLAPRE | | CHRHKGCMLCTMQAHITRAL |
| terminal | | KLPLSSRRPAAVGAGLQNMGNT | | HNPGHVIQPSQALAAGFHRG |
| hydrolase | | CYVNASLQCLTYTPPLANYMLS | | KQEDAHEFLMFTVDAMKKAC |
| 17-like | | REHSQTCHRHKGCMLCTMQAHI | | LPGHKQVDHHSKDTTLIHQI |
| protein 18 | | TRALHNPGHVIQPSQALAAGFH | | FGGYWRSQIKCLHCHGISDT |
| | | RGKQEDAHEFLMFTVDAMKKAC | | FDPYLDIALDIQAAQSVQQA |
| | | LPGHKQVDHHSKDTTLIHQIFG | | LEQLVKPEELNGENAYHCGV |
| | | GYWRSQIKCLHCHGISDTFDPY | | CLQRAPASKTLTLHTSAKVL |
| | | LDIALDIQAAQSVQQALEQLVK | | ILVLKRFSDVTGNKIAKNVQ |
| | | PEELNGENAYHCGVCLQRAPAS | | YPECLDMQPYMSQTNTGPLV |
| | | KTLTLHTSAKVLILVLKRFSDV | | YVLYAVLVHAGWSCHNGHYF |
| | | TGNKIAKNVQYPEC | | SYVKAQEGQWYKMDDAEVTA |
| | | LDMQPYMSQTNTGPLVYVLYAV | | SSITSVLSQQAYVLFYIQKS |
| | | LVHAGWSCHNGHYFSYVKAQEG | | |
| | | QWYKMDDAEVTASSITSVLSQQ | | |
| | | AYVLFYIQKSEWERHSESVSRG | | |
| | | REPRALGAEDTDRRAKQGELKR | | |
| | | DHPCLQAPELDEHLVERATQES | | |
| | | TLDHWKFLQEQNKTKPEFNVRK | | |
| | | VEGTLPPDVLVIHQSKYKCGMK | | |
| | | NHHPEQQSSLLNLSSTTPTHQE | | |
| | | SMNTGTLASLRGRARRSKGKNK | | |
| | | HSKRALLVCQ | | |
| UBP22_HUMAN | 35 | MVSRPEPEGEAMDAELAVAPPG | 147 | LGNTCFMNCIVQALTHTPLL |
| Ubiquitin | | CSHLGSFKVDNWKQNLRAIYQC | | RDFFLSDRHRCEMQSPSSCL |
| carboxyl- | | FVWSGTAEARKRKAKSCICHVC | | VCEMSSLFQEFYSGHRSPHI |
| terminal | | GVHLNRLHSCLYCVFFGCFTKK | | PYKLLHLVWTHARHLAGYEQ |
| hydrolase | | HIHEHAKAKRHNLAIDLMYGGI | | QDAHEFLIAALDVLHRHCKG |
| 22 | | YCFLCQDYIYDKDMEIIAKEEQ | | DDNGKKANNPNHCNCIIDQI |
| | | RKAWKMQGVGEKFSTWEPTKRE | | FTGGLQSDVTCQVCHGVSTT |
| | | LELLKHNPKRRKITSNCTIGLR | | IDPFWDISLDLPGSSTPFWP |
| | | GLINLGNTCFMNCIVQALTHTP | | LSPGSEGNVVNGESHVSGTT |
| | | LLRDFFLSDRHRCEMQSPSSCL | | TLTDCLRRFTRPEHLGSSAK |
| | | VCEMSSLFQEFYSGHRSPHIPY | | IKCSGCHSYQESTKQLTMKK |
| | | KLLHLVWTHARHLAGYEQQDAH | | LPIVACFHLKRFEHSAKLRR |
| | | EFLIAALDVLHRHCKGDDNGKK | | KITTYVSFPLELDMTPFMAS |
| | | ANNPNHCNCIIDQIFTGGLQSD | | SKESRMNGQYQQPTDSLNND |
| | | VTCQVCHGVSTTIDPFWDISLD | | NKYSLFAVVNHQGTLESGHY |
| | | LPGSSTPFWPLSPGSEGNVVNG | | TSFIRQHKDQWFKCDDAIIT |
| | | ESHVSGTTTLTDCLRRFTRPEH | | KASIKDVLDSEGYLLFYHKQ |
| | | LGSSAKIKCSGCHSYQESTKQL | | F |
| | | TMKKLPIVACFHLKRFEHSAKL | | |
| | | RRKITTYVSFPLELDMTPEMAS | | |
| | | SKESRMNGQYQQPTDSLNNDNK | | |
| | | YSLFAVVNHQGTLESGHYTSFI | | |
| | | RQHKDQWFKCDDAIITKASIKD | | |
| | | VLDSEGYLLFYHKQFLEYE | | |
| UBP18_HUMAN | 36 | MSKAFGLLRQICQSILAESSQS | 148 | KGLVPGLVNLGNTCFMNSLL |
| Ubl | | PADLEEKKEEDSNMKREQPRER | | QGLSACPAFIRWLEEFTSQY |
| carboxyl- | | PRAWDYPHGLVGLHNIGQTCCL | | SRDQKEPPSHQYLSLTLLHL |
| terminal | | NSLIQVFVMNVDFTRILKRITV | | LKALSCQEVTDDEVLDASCL |
| hydrolase | | PRGADEQRRSVPFQMLLLLEKM | | LDVLRMYRWQISSFEEQDAH |
| 18 | | QDSRQKAVRPLELAYCLQKCNV | | ELFHVITSSLEDERDRQPRV |
| | | PLFVQHDAAQLYLKLWNLIKDQ | | THLFDVHSLEQQSEITPKQI |
| | | ITDVHLVERLQALYTIRVKDSL | | TCRTRGSPHPTSNHWKSQHP |
| | | ICVDCAMESSRNSSMLTLPLSL | | FHGRLTSNMVCKHCEHQSPV |
| | | FDVDSKPLKTLEDALHCFFQPR | | RFDTFDSLSLSIPAATWGHP |
| | | ELSSKSKCFCENCGKKTRGKQV | | LTLDHCLHHFISSESVRDVV |
| | | LKLTHLPQTLTIHLMRESIRNS | | CDNCTKIEAKGTLNGEKVEH |
| | | QTRKICHSLYFPQSLDESQILP | | QRTTFVKQLKLGKLPQCLCI |
| | | MKRESCDAEEQSGG | | HLQRLSWSSHGTPLKRHEHV |
| | | QYELFAVIAHVGMADSGHYCVY | | QFNEFLMMDIYKYHLLGHKP |
| | | IRNAVDGKWFCFNDSNICLVSW | | SQHNPKLNKNPGPTLELQDG |
| | | EDIQCTYGNPNYHWQETAYLLV | | PGAPTPVLNQPGAPKTQIFM |
| | | YMKMEC | | NGACSPSLLPTLSAPMPFPL |
| | | | | PVVPDYSSSTYLFRLMAVVV |
| | | | | HHGDMHSGHFVTYRRSPPSA |
| | | | | RNPLSTSNQWLWVSDDTVRK |
| | | | | ASLQEVLSSSAYLLFYERVL |
| UBP28_HUMAN | 37 | MTAELQQDDAAGAADGHGSSCQ | 149 | GWPVGLKNVGNTCWFSAVIQ |
| Ubiquitin | | MLLNQLREITGIQDPSFLHEAL | | SLFQLPEFRRLVLSYSLPQN |
| carboxyl- | | KASNGDITQAVSLLTDERVKEP | | VLENCRSHTEKRNIMFMQEL |
| terminal | | SQDTVATEPSEVEGSAANKEVL | | QYLFALMMGSNRKFVDPSAA |
| hydrolase | | AKVIDLTHDNKDDLQAAIALSL | | LDLLKGAFRSSEEQQQDVSE |
| 28 | | LESPKIQADGRDLNRMHEATSA | | FTHKLLDWLEDAFQLAVNVN |
| | | ETKRSKRKRCEVWGENPNPNDW | | SPRNKSENPMVQLFYGTFLT |
| | | RRVDGWPVGLKNVGNTCWFSAV | | EGVREGKPFCNNETFGQYPL |
| | | IQSLFQLPEFRRLVLSYSLPQN | | QVNGYRNLDECLEGAMVEGD |
| | | VLENCRSHTEKRNIMFMQELQY | | VELLPSDHSVKYGQERWFTK |
| | | LFALMMGSNRKFVDPSAALDLL | | LPPVLTFELSRFEFNQSLGQ |
| | | KGAFRSSEEQQQDVSEFTHKLL | | PEKIHNKLEFPQIIYMDRYM |
| | | DWLEDAFQLAVNVNSPRNKSEN | | YRSKELIRNKRECIRKLKEE |
| | | PMVQLFYGTFLTEG | | IKILQQKLERYVKYGSGPAR |
| | | VREGKPFCNNETFGQYPLQVNG | | FPLPDMLKYVIEFASTKPAS |
| | | YRNLDECLEGAMVEGDVELLPS | | ESCPPESDTHMTLPLSSVHC |
| | | DHSVKYGQERWFTKLPPVLTFE | | SVSDQTSKESTSTESSSQDV |
| | | LSRFEFNQSLGQPEKIHNKLEF | | ESTFSSPEDSLPKSKPLTSS |
| | | PQIIYMDRYMYRSKELIRNKRE | | RSSMEMPSQPAPRTVTDEEI |
| | | CIRKLKEEIKILQQKLERYVKY | | NFVKTCLQRWRSEIEQDIQD |
| | | GSGPARFPLPDMLKYVIEFAST | | LKTCIASTTQTIEQMYCDPL |
| | | KPASESCPPESDTHMTLPLSSV | | LRQVPYRLHAVLVHEGQANA |
| | | HCSVSDQTSKESTSTESSSQDV | | GHYWAYIYNQPRQSWLKYND |
| | | ESTFSSPEDSLPKSKPLTSSRS | | ISVTESSWEEVERDSYGGLR |
| | | SMEMPSQPAPRTVTDEEINFVK | | NVSAYCLMYINDKLPY |
| | | TCLQRWRSEIEQDIQDLKTCIA | | |
| | | STTQTIEQMYCDPLLRQVPYRL | | |
| | | HAVLVHEGQANAGHYWAYIYNQ | | |
| | | PRQSWLKYNDISVTESSWEEVE | | |
| | | RDSYGGLRNVSAYCLMYINDKL | | |
| | | PYFNAEAAPTESDQMSEVEALS | | |
| | | VELKHYIQEDNWRFEQEVEEWE | | |
| | | EEQSCKIPQMESSINSSSQDYS | | |
| | | TSQEPSVASSHGVRCLSSEHAV | | |
| | | IVKEQTAQAIANTARAYEKSGV | | |
| | | EAALSEVMLSPAMQGVILAIAK | | |
| | | ARQTFDRDGSEAGLIKAFHEEY | | |
| | | SRLYQLAKETPTSHSDPRLQHV | | |
| | | LVYFFQNEAPKRVVERTLLEQF | | |
| | | ADKNLSYDERSISIMKVAQAKL | | |
| | | KEIGPDDMNMEEYKKWHEDYSL | | |
| | | FRKVSVYLLTGLELYQKGKYQE | | |
| | | ALSYLVYAYQSNAALLMKGPRR | | |
| | | GVKESVIALYRRKCLLELNAKA | | |
| | | ASLFETNDDHSVTEGINVMNEL | | |
| | | IIPCIHLIINNDISKDDLDAIE | | |
| | | VMRNHWCSYLGQDIAENLQLCL | | |
| | | GEFLPRLLDPSAEIIVLKEPPT | | |
| | | IRPNSPYDLCSRFAAVMESIQG | | |
| | | VSTVTVK | | |
| U17L2_HUMAN | 38 | MEDDSLYLGGEWQFNHFSKLTS | 150 | AVGAGLQNMGNTCYENASLQ |
| Ubiquitin | | SRPDAAFAEIQRTSLPEKSPLS | | CLTYTPPLANYMLSREHSQT |
| carboxyl- | | SEARVDLCDDLAPVARQLAPRK | | CQRPKCCMLCTMQAHITWAL |
| terminal | | KLPLSSRRPAAVGAGLQNMGNT | | HSPGHVIQPSQALAAGFHRG |
| hydrolase | | CYENASLQCLTYTPPLANYMLS | | KQEDAHEFLMFTVDAMKKAC |
| 17 | | REHSQTCQRPKCCMLCTMQAHI | | LPGHKQVDHHSKDTTLIHQI |
| | | TWALHSPGHVIQPSQALAAGFH | | FGGCWRSQIKCLHCHGISDT |
| | | RGKQEDAHEFLMFTVDAMKKAC | | FDPYLDIALDIQAAQSVKQA |
| | | LPGHKQVDHHSKDTTLIHQIFG | | LEQLVKPEELNGENAYHCGL |
| | | GCWRSQIKCLHCHGISDTFDPY | | CLQRAPASKTLTLHTSAKVL |
| | | LDIALDIQAAQSVKQALEQLVK | | ILVLKRFSDVTGNKLAKNVQ |
| | | PEELNGENAYHCGLCLQRAPAS | | YPECLDMQPYMSQQNTGPLV |
| | | KTLTLHTSAKVLILVLKRFSDV | | YVLYAVLVHAGWSCHDGHYF |
| | | TGNKLAKNVQYPEC | | SYVKAQEGQWYKMDDAKVTA |
| | | LDMQPYMSQQNTGPLVYVLYAV | | CSITSVLSQQAYVLFYIQKS |
| | | LVHAGWSCHDGHYFSYVKAQEG | | |
| | | QWYKMDDAKVTACSITSVLSQQ | | |
| | | AYVLFYIQKSEWERHSESVSRG | | |
| | | REPRALGAEDTDRRATQGELKR | | |
| | | DHPCLQAPELDERLVERATQES | | |
| | | TLDHWKFPQEQNKTKPEFNVRK | | |
| | | VEGTLPPNVLVIHQSKYKCGMK | | |
| | | NHHPEQQSSLLNLSSTTRTDQE | | |
| | | SVNTGTLASLQGRTRRSKGKNK | | |
| | | HSKRALLVCQ | | |
| UBP31_HUMAN | 39 | MSKVTAPGSGPPAAASGKEKRS | 151 | PVPGVAGLRNHGNTCFMNAT |
| Ubiquitin | | FSKRLFRSGRAGGGGAGGPGAS | | LQCLSNTELFAEYLALGQYR |
| carboxyl- | | GPAAPSSPSSPSSARSVGSEMS | | AGRPEPSPDPEQPAGRGAQG |
| terminal | | RVLKTLSTLSHLSSEGAAPDRG | | QGEVTEQLAHLVRALWTLEY |
| hydrolase | | GLRSCFPPGPAAAPTPPPCPPP | | TPQHSRDFKTIVSKNALQYR |
| 31 | | PASPAPPACAAEPVPGVAGLRN | | GNSQHDAQEFLLWLLDRVHE |
| | | HGNTCFMNATLQCLSNTELFAE | | DLNHSVKQSGQPPLKPPSET |
| | | YLALGQYRAGRPEPSPDPEQPA | | DMMPEGPSFPVCSTFVQELF |
| | | GRGAQGQGEVTEQLAHLVRALW | | QAQYRSSLTCPHCQKQSNTF |
| | | TLEYTPQHSRDFKTIVSKNALQ | | DPFLCISLPIPLPHTRPLYV |
| | | YRGNSQHDAQEFLLWLLDRVHE | | TVVYQGKCSHCMRIGVAVPL |
| | | DLNHSVKQSGQPPLKPPSETDM | | SGTVARLREAVSMETKIPTD |
| | | MPEGPSFPVCSTFVQELFQAQY | | QIVLTEMYYDGFHRSFCDTD |
| | | RSSLTCPHCQKQSN | | DLETVHESDCIFAFETPEIF |
| | | TFDPFLCISLPIPLPHTRPLYV | | RPEGILSQRGIHLNNNLNHL |
| | | TVVYQGKCSHCMRIGVAVPLSG | | KFGLDYHRLSSPTQTAAKQG |
| | | TVARLREAVSMETKIPTDQIVL | | KMDSPTSRAGSDKIVLLVCN |
| | | TEMYYDGFHRSFCDTDDLETVH | | RACTGQQGKRFGLPFVLHLE |
| | | ESDCIFAFETPEIFRPEGILSQ | | KTIAWDLLQKEILEKMKYFL |
| | | RGIHLNNNLNHLKFGLDYHRLS | | RPTVCIQVCPFSLRVVSVVG |
| | | SPTQTAAKQGKMDSPTSRAGSD | | ITYLLPQEEQPLCHPIVE |
| | | KIVLLVCNRACTGQQGKRFGLP | | RALKSCGPGGTAHVKLVVEW |
| | | FVLHLEKTIAWDLLQKEILEKM | | DKETRDFLFVNTEDEYIPDA |
| | | KYFLRPTVCIQVCPFSLRVVSV | | ESVRLQRERHHQPQTCTLSQ |
| | | VGITYLLPQEEQPLCHPIVERA | | CFQLYTKEERLAPDDAWRCP |
| | | LKSCGPGGTAHVKLVVEWDKET | | HCKQLQQGSITLSLWTLPDV |
| | | RDFLFVNTEDEYIPDAESVRLQ | | LIIHLKRFRQEGDRRMKLQN |
| | | RERHHQPQTCTLSQ | | MVKFPLTGLDMTPHVVKRSQ |
| | | CFQLYTKEERLAPDDAWRCPHC | | SSWSLPSHWSPWRRPYGLGR |
| | | KQLQQGSITLSLWTLPDVLIIH | | DPEDYIYDLYAVCNHHGTMQ |
| | | LKRFRQEGDRRMKLQNMVKFPL | | GGHYTAYCKNSVDGLWYCFD |
| | | TGLDMTPHVVKRSQSSWSLPSH | | DSDVQQLSEDEVCTQTAYIL |
| | | WSPWRRPYGLGRDPEDYIYDLY | | FYQRRT |
| | | AVCNHHGTMQGGHYTAYCKNSV | | |
| | | DGLWYCFDDSDVQQLSEDEVCT | | |
| | | QTAYILFYQRRTAIPSWSANSS | | |
| | | VAGSTSSSLCEHWVSRLPGSKP | | |
| | | ASVTSAASSRRTSLASLSESVE | | |
| | | MTGERSEDDGGFSTRPFVRSVQ | | |
| | | RQSLSSRSSVTSPLAVNENCMR | | |
| | | PSWSLSAKLQMRSNSPSRFSGD | | |
| | | SPIHSSASTLEKIG | | |
| | | EAADDKVSISCFGSLRNLSSSY | | |
| | | QEPSDSHSRREHKAVGRAPLAV | | |
| | | MEGVFKDESDTRRLNSSVVDTQ | | |
| | | SKHSAQGDRLPPLSGPFDNNNQ | | |
| | | IAYVDQSDSVDSSPVKEVKAPS | | |
| | | HPGSLAKKPESTTKRSPSSKGT | | |
| | | SEPEKSLRKGRPALASQESSLS | | |
| | | STSPSSPLPVKVSLKPSRSRSK | | |
| | | ADSSSRGSGRHSSPAPAQPKKE | | |
| | | SSPKSQDSVSSPSPQKQKSASA | | |
| | | LTYTASSTSAKKASGPATRSPF | | |
| | | PPGKSRTSDHSLSREGSRQSLG | | |
| | | SDRASATSTSKPNSPRVSQARA | | |
| | | GEGRGAGKHVRSSS | | |
| | | MASLRSPSTSIKSGLKRDSKSE | | |
| | | DKGLSFFKSALRQKETRRSTDL | | |
| | | GKTALLSKKAGGSSVKSVCKNT | | |
| | | GDDEAERGHQPPASQQPNANTT | | |
| | | GKEQLVTKDPASAKHSLLSARK | | |
| | | SKSSQLDSGVPSSPGGRQSAEK | | |
| | | SSKKLSSSMQTSARPSQKPQ | | |
| U17LJ_HUMAN | 40 | MEEDSLYLGGEWQFNHFSKLTS | 152 | AVGAGLQNMGNTCYVNASLQ |
| Ubiquitin | | SRPDAAFAEIQRTSLPEKSPLS | | CLTYTPPLANYMLSREHSQT |
| carboxyl- | | CETRVDLCDDLAPVARQLAPRE | | CHRHKGCMLCTMQAHITRAL |
| terminal | | KLPLSSRRPAAVGAGLQNMGNT | | HNPGHVIQPSQALAAGFHRG |
| hydrolase | | CYVNASLQCLTYTPPLANYMLS | | KQEDAHEFLMFTVDAMKKAC |
| 17-like | | REHSQTCHRHKGCMLCTMQAHI | | LPGHKQVDHHSKDTTLIHQI |
| protein 19 | | TRALHNPGHVIQPSQALAAGFH | | FGGYWRSQIKCLHCHGISDT |
| | | RGKQEDAHEFLMFTVDAMKKAC | | FDPYLDIALDIQAAQSVQQA |
| | | LPGHKQVDHHSKDTTLIHQIFG | | LEQLVKPEELNGENAYHCGV |
| | | GYWRSQIKCLHCHGISDTFDPY | | CLQRAPASKTLTLHTSAKVL |
| | | LDIALDIQAAQSVQQALEQLVK | | ILVLKRFSDVTGNKIAKNVQ |
| | | PEELNGENAYHCGVCLQRAPAS | | YPECLDMQPYMSQTNTGPLV |
| | | KTLTLHTSAKVLILVLKRFSDV | | YVLYAVLVHAGWSCHNGHYF |
| | | TGNKIAKNVQYPEC | | SYVKAQEGQWYKMDDAEVTA |
| | | LDMQPYMSQTNTGPLVYVLYAV | | SSITSVLSQQAYVLFYIQKS |
| | | LVHAGWSCHNGHYFSYVKAQEG | | EWERHSESVSRGREPRALGA |
| | | QWYKMDDAEVTASSITSVLSQQ | | EDTDRRATQGELKRDHPCLQ |
| | | AYVLFYIQKSEWERHSESVSRG | | APEL |
| | | REPRALGAEDTDRRATQGELKR | | |
| | | DHPCLQAPELDEHLVERATQES | | |
| | | TLDHWKFLQEQNKTKPEFNVRK | | |
| | | VEGTLPPDVLVIHQSKYKCGMK | | |
| | | NHHPEQQSSLLKLSSTTPTHQE | | |
| | | SMNTGTLASLRGRARRSKGKNK | | |
| | | HSKRALLVCQ | | |
| U17LF_HUMAN | 41 | MEDDSLYLGGEWQFNHFSKLTS | 153 | AVGAGLQNMGNTCYVNASLQ |
| Ubiquitin | | SRPDAAFAEIQRTSLPEKSPLS | | CLTYTPPLANYMLSREHSQT |
| carboxyl- | | CETRVDLCDDLAPVARQLAPRE | | CHRHKGCMLCTMQAHITRAL |
| terminal | | KLPLSSRRPAAVGAGLQNMGNT | | HNPGHVIQPSQALAAGFHRG |
| hydrolase | | CYVNASLQCLTYTPPLANYMLS | | KQEDAHEFLMFTVDAMKKAC |
| 17-like | | REHSQTCHRHKGCMLCTMQAHI | | LPGHKQVDHHSKDTTLIHQI |
| protein 15 | | TRALHNPGHVIQPSQALAAGFH | | FGGYWRSQIKCLHCHGISDT |
| | | RGKQEDAHEFLMFTVDAMKKAC | | FDPYLDIALDIQAAQSVQQA |
| | | LPGHKQVDHHSKDTTLIHQIFG | | LEQLVKPEELNGENAYHCGV |
| | | GYWRSQIKCLHCHGISDTFDPY | | CLQRAPASKTLTLHTSAKVL |
| | | LDIALDIQAAQSVQQALEQLVK | | ILVLKRFSDVTGNKIDKNVQ |
| | | PEELNGENAYHCGVCLQRAPAS | | YPECLDMKLYMSQTNSGPLV |
| | | KTLTLHTSAKVLILVLKRFSDV | | YVLYAVLVHAGWSCHNGHYF |
| | | TGNKIDKNVQYPEC | | SYVKAQEGQWYKMDDAEVTA |
| | | LDMKLYMSQTNSGPLVYVLYAV | | SSITSVLSQQAYVLFYIQKS |
| | | LVHAGWSCHNGHYFSYVKAQEG | | |
| | | QWYKMDDAEVTASSITSVLSQQ | | |
| | | AYVLFYIQKSEWERHSESVSRG | | |
| | | REPRALGAEDTDRRATQGELKR | | |
| | | DHPCLQAPELDEHLVERATQES | | |
| | | TLDHWKFLQEQNKTKPEFNVRK | | |
| | | VEGTLPPDVLVIHQSKYKCGMK | | |
| | | NHHPEQQSSLLNLSSTTPTHQE | | |
| | | SMNTGTLASLRGRARRSKGKNK | | |
| | | HSKRALLVCQWSQWKYRPTRRG | | |
| | | AHTHAHTQTHT | | |
| UBP47_HUMAN | 42 | MVPGEENQLVPKEDVFWRCRQN | 154 | ETGYVGLVNQAMTCYLNSLL |
| Ubiquitin | | IFDEMKKKFLQIENAAEEPRVL | | QTLFMTPEFRNALYKWEFEE |
| carboxyl- | | CIIQDTTNSKTVNERITLNLPA | | SEEDPVTSIPYQLQRLFVLL |
| terminal | | STPVRKLFEDVANKVGYINGTF | | QTSKKRAIETTDVTRSFGWD |
| hydrolase | | DLVWGNGINTADMAPLDHTSDK | | SSEAWQQHDVQELCRVMFDA |
| 47 | | SLLDANFEPGKKNFLHLTDKDG | | LEQKWKQTEQADLINELYQG |
| | | EQPQILLEDSSAGEDSVHDRFI | | KLKDYVRCLECGYEGWRIDT |
| | | GPLPREGSGGSTSDYVSQSYSY | | YLDIPLVIRPYGSSQAFASV |
| | | SSILNKSETGYVGLVNQAMTCY | | EEALHAFIQPEILDGPNQYF |
| | | LNSLLQTLFMTPEFRNALYKWE | | CERCKKKCDARKGLRFLHFP |
| | | FEESEEDPVTSIPYQLQRLFVL | | YLLTLQLKRFDFDYTTMHRI |
| | | LQTSKKRAIETTDVTRSFGWDS | | KLNDRMTFPEELDMSTFIDV |
| | | SEAWQQHDVQELCRVMFDALEQ | | EDEKSPQTESCTDSGAENEG |
| | | KWKQTEQADLINEL | | SCHSDQMSNDFSNDDGVDEG |
| | | YQGKLKDYVRCLECGYEGWRID | | ICLETNSGTEKISKSGLEKN |
| | | TYLDIPLVIRPYGSSQAFASVE | | SLIYELFSVMVHSGSAAGGH |
| | | EALHAFIQPEILDGPNQYFCER | | YYACIKSFSDEQWYSFNDQH |
| | | CKKKCDARKGLRFLHFPYLLTL | | VSRITQEDIKKTHGGSSGSR |
| | | QLKRFDFDYTTMHRIKLNDRMT | | GYYSSAFASSTNAYMLIYRL |
| | | FPEELDMSTFIDVEDEKSPQTE | | KD |
| | | SCTDSGAENEGSCHSDQMSNDF | | |
| | | SNDDGVDEGICLETNSGTEKIS | | |
| | | KSGLEKNSLIYELFSVMVHSGS | | |
| | | AAGGHYYACIKSFSDEQWYSFN | | |
| | | DQHVSRITQEDIKKTHGGSSGS | | |
| | | RGYYSSAFASSTNAYMLIYRLK | | |
| | | DPARNAKFLEVDEYPEHIKNLV | | |
| | | QKERELEEQEKRQR | | |
| | | EIERNTCKIKLFCLHPTKQVMM | | |
| | | ENKLEVHKDKTLKEAVEMAYKM | | |
| | | MDLEEVIPLDCCRLVKYDEFHD | | |
| | | YLERSYEGEEDTPMGLLLGGVK | | |
| | | STYMEDLLLETRKPDQVFQSYK | | |
| | | PGEVMVKVHVVDLKAESVAAPI | | |
| | | TVRAYLNQTVTEFKQLISKAIH | | |
| | | LPAETMRIVLERCYNDLRLLSV | | |
| | | SSKTLKAEGFFRSNKVFVESSE | | |
| | | TLDYQMAFADSHLWKLLDRHAN | | |
| | | TIRLFVLLPEQSPVSYSKRTAY | | |
| | | QKAGGDSGNVDDDCERVKGPVG | | |
| | | SLKSVEAILEESTEKLKSLSLQ | | |
| | | QQQDGDNGDSSKST | | |
| | | ETSDFENIESPLNERDSSASVD | | |
| | | NRELEQHIQTSDPENFQSEERS | | |
| | | DSDVNNDRSTSSVDSDILSSSH | | |
| | | SSDTLCNADNAQIPLANGLDSH | | |
| | | SITSSRRTKANEGKKETWDTAE | | |
| | | EDSGTDSEYDESGKSRGEMQYM | | |
| | | YFKAEPYAADEGSGEGHKWLMV | | |
| | | HVDKRITLAAFKQHLEPFVGVL | | |
| | | SSHFKVFRVYASNQEFESVRLN | | |
| | | ETLSSFSDDNKITIRLGRALKK | | |
| | | GEYRVKVYQLLVNEQEPCKFLL | | |
| | | DAVFAKGMTVRQSKEELIPQLR | | |
| | | EQCGLELSIDRFRLRKKTWKNP | | |
| | | GTVFLDYHIYEEDI | | |
| | | NISSNWEVFLEVLDGVEKMKSM | | |
| | | SQLAVLSRRWKPSEMKLDPFQE | | |
| | | VVLESSSVDELREKLSEISGIP | | |
| | | LDDIEFAKGRGTFPCDISVLDI | | |
| | | HQDLDWNPKVSTLNVWPLYICD | | |
| | | DGAVIFYRDKTEELMELTDEQR | | |
| | | NELMKKESSRLQKTGHRVTYSP | | |
| | | RKEKALKIYLDGAPNKDLTQD | | |
| UBP51_HUMAN | 43 | MAQVRETSLPSGSGVRWISGGG | 155 | YTVGLRGLINLGNTCFMNCI |
| Ubiquitin | | GGASPEEAVEKAGKMEEAAAGA | | VQALTHIPLLKDFFLSDKHK |
| carboxyl- | | TKASSRREAEEMKLEPLQEREP | | CIMTSPSLCLVCEMSSLFHA |
| terminal | | APEENLTWSSSGGDEKVLPSIP | | MYSGSRTPHIPYKLLHLIWI |
| hydrolase | | LRCHSSSSPVCPRRKPRPRPQP | | HAEHLAGYRQQDAHEFLIAI |
| 51 | | RARSRSQPGLSAPPPPPARPPP | | LDVLHRHSKDDSGGQEANNP |
| | | PPPPPPPPAPRPRAWRGSRRRS | | NCCNCIIDQIFTGGLQSDVT |
| | | RPGSRPQTRRSCSGDLDGSGDP | | CQACHSVSTTIDPCWDISLD |
| | | GGLGDWLLEVEFGQGPTGCSHV | | LPGSCATFDSQNPERADSTV |
| | | ESFKVGKNWQKNLRLIYQRFVW | | SRDDHIPGIPSLTDCLQWFT |
| | | SGTPETRKRKAKSCICHVCSTH | | RPEHLGSSAKIKCNSCQSYQ |
| | | MNRLHSCLSCVFFGCFTEKHIH | | ESTKQLTMKKLPIVACFHLK |
| | | KHAETKQHHLAVDLYHGVIYCF | | RFEHVGKQRRKINTFISFPL |
| | | MCKDYVYDKDIEQI | | ELDMTPFLASTKESRMKEGQ |
| | | AKETKEKILRLLTSTSTDVSHQ | | PPTDCVPNENKYSLFAVINH |
| | | QFMTSGFEDKQSTCETKEQEPK | | HGTLESGHYTSFIRQQKDQW |
| | | LVKPKKKRRKKSVYTVGLRGLI | | FSCDDAIITKATIEDLLYSE |
| | | NLGNTCFMNCIVQALTHIPLLK | | GYLLFYHKQG |
| | | DFFLSDKHKCIMTSPSLCLVCE | | |
| | | MSSLFHAMYSGSRTPHIPYKLL | | |
| | | HLIWIHAEHLAGYRQQDAHEFL | | |
| | | IAILDVLHRHSKDDSGGQEANN | | |
| | | PNCCNCIIDQIFTGGLQSDVTC | | |
| | | QACHSVSTTIDPCWDISLDLPG | | |
| | | SCATFDSQNPERADSTVSRDDH | | |
| | | IPGIPSLTDCLQWFTRPEHLGS | | |
| | | SAKIKCNSCQSYQESTKQLTMK | | |
| | | KLPIVACFHLKRFE | | |
| | | HVGKQRRKINTFISFPLELDMT | | |
| | | PFLASTKESRMKEGQPPTDCVP | | |
| | | NENKYSLFAVINHHGTLESGHY | | |
| | | TSFIRQQKDQWFSCDDAIITKA | | |
| | | TIEDLLYSEGYLLFYHKQGLEK | | |
| | | D | | |
| UBP36_HUMAN | 44 | MPIVDKLKEALKPGRKDSADDG | 156 | RVGAGLHNLGNTCFLNATIQ |
| Ubiquitin | | ELGKLLASSAKKVLLQKIEFEP | | CLTYTPPLANYLLSKEHARS |
| carboxyl- | | ASKSFSYQLEALKSKYVLLNPK | | CHQGSFCMLCVMQNHIVQAF |
| terminal | | TEGASRHKSGDDPPARRQGSEH | | ANSGNAIKPVSFIRDLKKIA |
| hydrolase | | TYESCGDGVPAPQKVLFPTERL | | RHFREGNQEDAHEFLRYTID |
| 36 | | SLRWERVFRVGAGLHNLGNTCF | | AMQKACLNGCAKLDRQTQAT |
| | | LNATIQCLTYTPPLANYLLSKE | | TLVHQIFGGYLRSRVKCSVC |
| | | HARSCHQGSFCMLCVMQNHIVQ | | KSVSDTYDPYLDVALEIRQA |
| | | AFANSGNAIKPVSFIRDLKKIA | | ANIVRALELFVKADVLSGEN |
| | | RHFRFGNQEDAHEFLRYTIDAM | | AYMCAKCKKKVPASKRFTIH |
| | | QKACLNGCAKLDRQTQATTLVH | | RTSNVLTLSLKRFANFSGGK |
| | | QIFGGYLRSRVKCSVCKSVSDT | | ITKDVGYPEFLNIRPYMSQN |
| | | YDPYLDVALEIRQAANIVRALE | | NG |
| | | LFVKADVLSGENAY | | DPVMYGLYAVLVHSGYSCHA |
| | | MCAKCKKKVPASKRFTIHRTSN | | GHYYCYVKASNGQWYQMNDS |
| | | VLTLSLKRFANFSGGKITKDVG | | LVHSSNVKVVLNQQAYVLFY |
| | | YPEFLNIRPYMSQNNGDPVMYG | | LRIP |
| | | LYAVLVHSGYSCHAGHYYCYVK | | |
| | | ASNGQWYQMNDSLVHSSNVKVV | | |
| | | LNQQAYVLFYLRIPGSKKSPEG | | |
| | | LISRTGSSSLPGRPSVIPDHSK | | |
| | | KNIGNGIISSPLTGKRQDSGTM | | |
| | | KKPHTTEEIGVPISRNGSTLGL | | |
| | | KSQNGCIPPKLPSGSPSPKLSQ | | |
| | | TPTHMPTILDDPGKKVKKPAPP | | |
| | | QHFSPRTAQGLPGTSNSNSSRS | | |
| | | GSQRQGSWDSRDVVLSTSPKLL | | |
| | | ATATANGHGLKGND | | |
| | | ESAGLDRRGSSSSSPEHSASSD | | |
| | | STKAPQTPRSGAAHLCDSQETN | | |
| | | CSTAGHSKTPPSGADSKTVKLK | | |
| | | SPVLSNTTTEPASTMSPPPAKK | | |
| | | LALSAKKASTLWRATGNDLRPP | | |
| | | PPSPSSDLTHPMKTSHPVVAST | | |
| | | WPVHRARAVSPAPQSSSRLQPP | | |
| | | FSPHPTLLSSTPKPPGTSEPRS | | |
| | | CSSISTALPQVNEDLVSLPHQL | | |
| | | PEASEPPQSPSEKRKKTFVGEP | | |
| | | QRLGSETRLPQHIREATAAPHG | | |
| | | KRKRKKKKRPEDTAASALQEGQ | | |
| | | TQRQPGSPMYRREGQAQLPAVR | | |
| | | RQEDGTQPQVNGQQ | | |
| | | VGCVTDGHHASSRKRRRKGAEG | | |
| | | LGEEGGLHQDPLRHSCSPMGDG | | |
| | | DPEAMEESPRKKKKKKRKQETQ | | |
| | | RAVEEDGHLKCPRSAKPQDAVV | | |
| | | PESSSCAPSANGWCPGDRMGLS | | |
| | | QAPPVSWNGERESDVVQELLKY | | |
| | | SSDKAYGRKVLTWDGKMSAVSQ | | |
| | | DAIEDSRQARTETVVDDWDEEF | | |
| | | DRGKEKKIKKEKREKRRNFNAF | | |
| | | QKLQTRRNFWSVTHPAKAASLS | | |
| | | YRR | | |
| UBP44_HUMAN | 45 | MLAMDTCKHVGQLQLAQDHSSL | 157 | TPGVTGLRNLGNTCYMNSVL |
| Ubiquitin | | NPQKWHCVDCNTTESIWACLSC | | QVLSHLLIFRQCFLKLDLNQ |
| carboxyl- | | SHVACGRYIEEHALKHFQESSH | | WLAMTASEKTRSCKHPPVTD |
| terminal | | PVALEVNEMYVFCYLCDDYVLN | | TVVYQMNECQEKDTGFVCSR |
| hydrolase | | DNTTGDLKLLRRTLSAIKSQNY | | QSSLSSGLSGGASKGRKMEL |
| 44 | | HCTTRSGRFLRSMGTGDDSYFL | | IQPKEPTSQYISLCHELHTL |
| | | HDGAQSLLQSEDQLYTALWHRR | | FQVMWSGKWALVSPFAMLHS |
| | | RILMGKIFRTWFEQSPIGRKKQ | | VWRLIPAFRGYAQQDAQEFL |
| | | EEPFQEKIVVKREVKKRRQELE | | CELLDKIQRELETTGTSLPA |
| | | YQVKAELESMPPRKSLRLQGLA | | LIPTSQRKLIKQVLNVVNNI |
| | | QSTIIEIVSVQVPAQTPASPAK | | FHGQLLSQVTCLACDNKSNT |
| | | DKVLSTSENEISQKVSDSSVKR | | IEPFWDLSLEFPERYQCSGK |
| | | RPIVTPGVTGLRNLGNTCYMNS | | DIASQPCLVTEMLAKFTETE |
| | | VLQVLSHLLIFRQC | | ALEGKIYVCDQCNSKRRRFS |
| | | FLKLDLNQWLAMTASEKTRSCK | | SKPVVLTEAQKQLMICHLPQ |
| | | HPPVTDTVVYQMNECQEKDTGF | | VLRLHLKRFRWSGRNNREKI |
| | | VCSRQSSLSSGLSGGASKGRKM | | GVHVGFEEILNMEPYCCRET |
| | | ELIQPKEPTSQYISLCHELHTL | | LKSLRPECFIYDLSAVVMHH |
| | | FQVMWSGKWALVSPFAMLHSVW | | GKGFGSGHYTAYCYNSEGGF |
| | | RLIPAFRGYAQQDAQEFLCELL | | WVHCNDSKLSMCTMDEVCKA |
| | | DKIQRELETTGTSLPALIPTSQ | | QAYILFYTQRV |
| | | RKLIKQVLNVVNNIFHGQLLSQ | | |
| | | VTCLACDNKSNTIEPFWDLSLE | | |
| | | FPERYQCSGKDIASQPCLVTEM | | |
| | | LAKFTETEALEGKIYVCDQCNS | | |
| | | KRRRFSSKPVVLTEAQKQLMIC | | |
| | | HLPQVLRLHLKRFRWSGRNNRE | | |
| | | KIGVHVGFEEILNM | | |
| | | EPYCCRETLKSLRPECFIYDLS | | |
| | | AVVMHHGKGFGSGHYTAYCYNS | | |
| | | EGGFWVHCNDSKLSMCTMDEVC | | |
| | | KAQAYILFYTQRVTENGHSKLL | | |
| | | PPELLLGSQHPNEDADTSSNEI | | |
| | | LS | | |
| UBP8_HUMAN | 46 | MPAVASVPKELYLSSSLKDLNK | 158 | PALTGLRNLGNTCYMNSILQ |
| Ubiquitin | | KTEVKPEKISTKSYVHSALKIF | | CLCNAPHLADYFNRNCYQDD |
| carboxyl- | | KTAEECRLDRDEERAYVLYMKY | | INRSNLLGHKGEVAEEFGII |
| terminal | | VTVYNLIKKRPDFKQQQDYFHS | | MKALWTGQYRYISPKDEKIT |
| hydrolase | | ILGPGNIKKAVEEAERLSESLK | | IGKINDQFAGYSQQDSQELL |
| 8 | | LRYEEAEVRKKLEEKDRQEEAQ | | LFLMDGLHEDLNKADNRKRY |
| | | RLQQKRQETGREDGGTLAKGSL | | KEENNDHLDDFKAAEHAWQK |
| | | ENVLDSKDKTQKSNGEKNEKCE | | HKQLNESIIVALFQGQFKST |
| | | TKEKGAITAKELYTMMTDKNIS | | VQCLTCHKKSRTFEAFMYLS |
| | | LIIMDARRMQDYQDSCILHSLS | | LPLASTSKCTLQDCLRLFSK |
| | | VPEEAISPGVTASWIEAHLPDD | | EEKLTDNNRFYCSHCRARRD |
| | | SKDTWKKRGNVEYVVLLDWFSS | | SLKKIEIWKLPPVLLVHLKR |
| | | AKDLQIGTTLRSLKDALFKWES | | FSYDGRWKQKLQTSVDFPLE |
| | | KTVLRNEPLVLEGG | | NLDLSQYVIGPKNNLKKYNL |
| | | YENWLLCYPQYTTNAKVTPPPR | | FSVSNHYGGLDGGHYTAYCK |
| | | RQNEEVSISLDFTYPSLEESIP | | NAARQRWFKFDDHEVSDISV |
| | | SKPAAQTPPASIEVDENIELIS | | SSVKSSAAYILFYTSLG |
| | | GQNERMGPLNISTPVEPVAASK | | |
| | | SDVSPIIQPVPSIKNVPQIDRT | | |
| | | KKPAVKLPEEHRIKSESTNHEQ | | |
| | | QSPQSGKVIPDRSTKPVVFSPT | | |
| | | LMLTDEEKARIHAETALLMEKN | | |
| | | KQEKELRERQQEEQKEKLRKEE | | |
| | | QEQKAKKKQEAEENEITEKQQK | | |
| | | AKEEMEKKESEQAKKEDKETSA | | |
| | | KRGKEITGVKRQSKSEHETSDA | | |
| | | KKSVEDRGKRCPTPEIQKKSTG | | |
| | | DVPHTSVTGDSGSG | | |
| | | KPFKIKGQPESGILRTGTFRED | | |
| | | TDDTERNKAQREPLTRARSEEM | | |
| | | GRIVPGLPSGWAKFLDPITGTF | | |
| | | RYYHSPTNTVHMYPPEMAPSSA | | |
| | | PPSTPPTHKAKPQIPAERDREP | | |
| | | SKLKRSYSSPDITQAIQEEEKR | | |
| | | KPTVTPTVNRENKPTCYPKAEI | | |
| | | SRLSASQIRNLNPVFGGSGPAL | | |
| | | TGLRNLGNTCYMNSILQCLCNA | | |
| | | PHLADYFNRNCYQDDINRSNLL | | |
| | | GHKGEVAEEFGIIMKALWTGQY | | |
| | | RYISPKDFKITIGKINDQFAGY | | |
| | | SQQDSQELLLFLMDGLHEDLNK | | |
| | | ADNRKRYKEENNDH | | |
| | | LDDFKAAEHAWQKHKQLNESII | | |
| | | VALFQGQFKSTVQCLTCHKKSR | | |
| | | TFEAFMYLSLPLASTSKCTLQD | | |
| | | CLRLFSKEEKLTDNNRFYCSHC | | |
| | | RARRDSLKKIEIWKLPPVLLVH | | |
| | | LKRFSYDGRWKQKLQTSVDEPL | | |
| | | ENLDLSQYVIGPKNNLKKYNLF | | |
| | | SVSNHYGGLDGGHYTAYCKNAA | | |
| | | RQRWFKFDDHEVSDISVSSVKS | | |
| | | SAAYILFYTSLGPRVTDVAT | | |
| UBP37_HUM | 47 | MSPLKIHGPIRIRSMQTGITKW | 159 | QQLQGFSNLGNTCYMNAILQ |
| AN Ubiquitin | | KEGSFEIVEKENKVSLVVHYNT | | SLFSLQSFANDLLKQGIPWK |
| carboxyl- | | GGIPRIFQLSHNIKNVVLRPSG | | KIPLNALIRRFAHLLVKKDI |
| terminal | | AKQSRLMLTLQDNSFLSIDKVP | | CNSETKKDLLKKVKNAISAT |
| hydrolase 37 | | SKDAEEMRLFLDAVHQNRLPAA | | AERFSGYMQNDAHEFLSQCL |
| | | MKPSQGSGSFGAILGSRTSQKE | | DQLKEDMEKLNKTWKTEPVS |
| | | TSRQLSYSDNQASAKRGSLETK | | GEENSPDISATRAYTCPVIT |
| | | DDIPFRKVLGNPGRGSIKTVAG | | NLEFEVQHSIICKACGEIIP |
| | | SGIARTIPSLTSTSTPLRSGLL | | KREQFNDLSIDLPRRKKPLP |
| | | ENRTEKRKRMISTGSELNEDYP | | PRSIQDSLDLFFRAEELEYS |
| | | KENDSSSNNKAMTDPSRKYLTS | | CEKCGGKCALVRHKFNRLPR |
| | | SREKQLSLKQSEENRTSGLLPL | | VLILHLKRYSFNVALSLNNK |
| | | QSSSFYGSRAGSKEHSSGGTNL | | IGQQVIIPRYLTLSSHCTEN |
| | | DRTNVSSQTPSAKR | | TKP |
| | | SLGFLPQPVPLSVKKLRCNQDY | | PFTLGWSAHMAISRPLKASQ |
| | | TGWNKPRVPLSSHQQQQLQGFS | | MVNSCITSPSTPSKKFTFKS |
| | | NLGNTCYMNAILQSLFSLQSFA | | KSSLALCLDSDSEDELKRSV |
| | | NDLLKQGIPWKKIPLNALIRRF | | ALSQRLCEMLGNEQQQEDLE |
| | | AHLLVKKDICNSETKKDLLKKV | | KDSKLCPIEPDKSELENSGF |
| | | KNAISATAERFSGYMQNDAHEF | | DRMSEEELLAAVLEISKRDA |
| | | LSQCLDQLKEDMEKLNKTWKTE | | SPSLSHEDDDKPTSSPDTGF |
| | | PVSGEENSPDISATRAYTCPVI | | AEDDIQEMPENPDTMETEKP |
| | | TNLEFEVQHSIICKACGEIIPK | | KTITELDPASFTEITKDCDE |
| | | REQFNDLSIDLPRRKKPLPPRS | | NKENKTPEGSQGEVDWLQQY |
| | | IQDSLDLFFRAEELEYSCEKCG | | DMEREREEQELQQALAQSLQ |
| | | GKCALVRHKFNRLPRVLILHLK | | EQEAWEQKEDDDLKRATELS |
| | | RYSFNVALSLNNKIGQQVIIPR | | LQEFNNSFVDALGSDEDSGN |
| | | YLTLSSHCTENTKP | | EDVFDMEYTEAEAEELKRNA |
| | | PFTLGWSAHMAISRPLKASQMV | | ETGNLPHSYRLISVVSHIGS |
| | | NSCITSPSTPSKKFTFKSKSSL | | TSSSGHYISDVYDIKKQAWF |
| | | ALCLDSDSEDELKRSVALSQRL | | TYNDLEVSKIQEAAVQSDRD |
| | | CEMLGNEQQQEDLEKDSKLCPI | | RSGYIFFYMHK |
| | | EPDKSELENSGFDRMSEEELLA | | |
| | | AVLEISKRDASPSLSHEDDDKP | | |
| | | TSSPDTGFAEDDIQEMPENPDT | | |
| | | METEKPKTITELDPASFTEITK | | |
| | | DCDENKENKTPEGSQGEVDWLQ | | |
| | | QYDMEREREEQELQQALAQSLQ | | |
| | | EQEAWEQKEDDDLKRATELSLQ | | |
| | | EFNNSFVDALGSDEDSGNEDVF | | |
| | | DMEYTEAEAEELKRNAETGNLP | | |
| | | HSYRLISVVSHIGS | | |
| | | TSSSGHYISDVYDIKKQAWFTY | | |
| | | NDLEVSKIQEAAVQSDRDRSGY | | |
| | | IFFYMHKEIFDELLETEKNSQS | | |
| | | LSTEVGKTTRQAL | | |
| U17LD_HUMAN | 48 | MEEDSLYLGGEWQFNHESKLTS | 160 | AVGAGLQNMGNTCYVNASLQ |
| Ubiquitin | | SRLDAAFAEIQRTSLPEKSPLS | | CLTYTPPLANYMLSREHSQT |
| carboxyl- | | CETRVDLCDDLVPEARQLAPRE | | CHRHKGCMLCTMQAHITRAL |
| terminal | | KLPLSSRRPAAVGAGLQNMGNT | | HNPGHVIQPSQALAAGFHRG |
| hydrolase | | CYVNASLQCLTYTPPLANYMLS | | KQEDAHEFLMFTVDAMKKAC |
| 17-like | | REHSQTCHRHKGCMLCTMQAHI | | LPGHKQVDHPSKDTTLIHQI |
| protein 13 | | TRALHNPGHVIQPSQALAAGFH | | FGGYWRSQIKCLHCHGISDT |
| | | RGKQEDAHEFLMFTVDAMKKAC | | FDPYLDIALDIQAAQSVQQA |
| | | LPGHKQVDHPSKDTTLIHQIFG | | LEQLVKPEELNGENAYHCGV |
| | | GYWRSQIKCLHCHGISDTFDPY | | CLQRAPASKTLTLHTSAKVL |
| | | LDIALDIQAAQSVQQALEQLVK | | ILVLKRFSDVTGNKIAKNVQ |
| | | PEELNGENAYHCGVCLQRAPAS | | YPECLDMQPYMSQQNTGPLV |
| | | KTLTLHTSAKVLILVLKRFSDV | | YVLYAVLVHAGWSCHNGHYF |
| | | TGNKIAKNVQYPEC | | SYVKAQEGQWYKMDDAEVTA |
| | | LDMQPYMSQQNTGPLVYVLYAV | | ASITSVLSQQAYVLFYIQKS |
| | | LVHAGWSCHNGHYFSYVKAQEG | | |
| | | QWYKMDDAEVTAASITSVLSQQ | | |
| | | AYVLFYIQKSEWERHSESVSRG | | |
| | | REPRALGAEDTDRRATQGELKR | | |
| | | DHPCLQAPELDEHLVERATQES | | |
| | | TLDRWKFLQEQNKTKPEFNVRK | | |
| | | VEGTLPPDVLVIHQSKYKCGMK | | |
| | | NHHPEQQSSLLNLSSSTPTHQE | | |
| | | SMNTGTLASLRGRARRSKGKNK | | |
| | | HSKRALLVCQ | | |
| U17L3_HUMAN | 49 | MGDDSLYLGGEWQFNHESKLTS | 161 | AVGAGLQNMGNTCYENASLQ |
| Ubiquitin | | SRPDAAFAEIQRTSLPEKSPLS | | CLTYTLPLANYMLSREHSQT |
| carboxyl- | | SETRVDLCDDLAPVARQLAPRE | | CQRPKCCMLCTMQAHITWAL |
| terminal | | KLPLSSRRPAAVGAGLQNMGNT | | HSPGHVIQPSQALASGFHRG |
| hydrolase | | CYENASLQCLTYTLPLANYMLS | | KQEDVHEFLMFTVDAMKKAC |
| 17-like | | REHSQTCQRPKCCMLCTMQAHI | | LPGHKQVDHHSKDTTLIHQI |
| protein 3 | | TWALHSPGHVIQPSQALASGFH | | FGGCWRSQIKCLHCHGISDT |
| | | RGKQEDVHEFLMFTVDAMKKAC | | FDPYLDIALDIQAAQSVKQA |
| | | LPGHKQVDHHSKDTTLIHQIFG | | LEQLVKPEELNGENAYHCGL |
| | | GCWRSQIKCLHCHGISDTFDPY | | CLQRAPASNTLTLHTSAKVL |
| | | LDIALDIQAAQSVKQALEQLVK | | ILVLKRFSDVAGNKLAKNVQ |
| | | PEELNGENAYHCGLCLQRAPAS | | YPECLDMQPYMSQQNTGPLV |
| | | NTLTLHTSAKVLILVLKRFSDV | | YVLYAVLVHAGWSCHDGHYF |
| | | AGNKLAKNVQYPEC | | SYVKAQEGQWYKMDDAEVTV |
| | | LDMQPYMSQQNTGPLVYVLYAV | | CSITSVLSQQAYVLFYIQKS |
| | | LVHAGWSCHDGHYFSYVKAQEG | | |
| | | QWYKMDDAEVTVCSITSVLSQQ | | |
| | | AYVLFYIQKSEWERHSESVSRG | | |
| | | REPRALGAEDTDRRAKQGELKR | | |
| | | DHPCLQAPELDEHLVERATQES | | |
| | | TLDHWKFLQEQNKTKPEFNVGK | | |
| | | VEGTLPPNALVIHQSKYKCGMK | | |
| | | NHHPEQQSSLLNLSSTTRTDQE | | |
| | | SMNTGTLASLQGRTRRAKGKNK | | |
| | | HSKRALLVCQ | | |
| UBP54_HUMAN | 50 | MSWKRNYFSGGRGSVQGMFAPR | 162 | APSKGLSNEPGQNSCFLNSA |
| Inactive | | SSTSIAPSKGLSNEPGQNSCFL | | LQVLWHLDIFRRSFRQLTTH |
| ubiquitin | | NSALQVLWHLDIFRRSFRQLTT | | KCMGDSCIFCALKGIFNQFQ |
| carboxyl- | | HKCMGDSCIFCALKGIFNQFQC | | CSSEKVLPSDTLRSALAKTF |
| terminal | | SSEKVLPSDTLRSALAKTFQDE | | QDEQRFQLGIMDDAAECFEN |
| hydrolase | | QRFQLGIMDDAAECFENLLMRI | | LLMRIHFHIADETKEDICTA |
| 54 | | HFHIADETKEDICTAQHCISHQ | | QHCISHQKFAMTLFEQCVCT |
| | | KFAMTLFEQCVCTSCGATSDPL | | SCGATSDPLPFIQ |
| | | PFIQMVHYISTTSLCNQAICML | | MVHYISTTSLCNQAICMLER |
| | | ERREKPSPSMFGELLQNASTMG | | REKPSPSMFGELLQNASTMG |
| | | DLRNCPSNCGERIRIRRVLMNA | | DLRNCPSNCGERIRIRRVLM |
| | | PQIITIGLVWDSDHSDLAEDVI | | NAPQIITIGLVWDSDHSDLA |
| | | HSLGTCLKLGDLFFRVTDDRAK | | EDVIHSLGTCLKLGDLFFRV |
| | | QSELYLVGMICYYG | | TDDRAKQSELYLVGMICYYG |
| | | KHYSTFFFQTKIRKWMYFDDAH | | KHYSTFFFQTKIRKWMYFDD |
| | | VKEIGPKWKDVVTKCIKGHYQP | | AHVKEIGPKWKDVVTKCIKG |
| | | LLLLYADPQGTPVSTQDLPPQA | | HYQPLLLLYADPQGTPVSTQ |
| | | EFQSYSRTCYDSEDSGREPSIS | | DLPPQAEFQSYSRTCYDSED |
| | | SDTRTDSSTESYPYKHSHHESV | | SGREPSISSDTRTDSSTESY |
| | | VSHFSSDSQGTVIYNVENDSMS | | PYKHSHHESVVSHFSSDSQG |
| | | QSSRDTGHLTDSECNQKHTSKK | | TVIYNVEND |
| | | GSLIERKRSSGRVRRKGDEPQA | | |
| | | SGYHSEGETLKEKQAPRNASKP | | |
| | | SSSTNRLRDFKETVSNMIHNRP | | |
| | | SLASQTNVGSHCRGRGGDQPDK | | |
| | | KPPRTLPLHSRDWEIESTSSES | | |
| | | KSSSSSKYRPTWRPKRESLNID | | |
| | | SIFSKDKRKHCGYT | | |
| | | QLSPFSEDSAKEFIPDEPSKPP | | |
| | | SYDIKFGGPSPQYKRWGPARPG | | |
| | | SHLLEQHPRLIQRMESGYESSE | | |
| | | RNSSSPVSLDAALPESSNVYRD | | |
| | | PSAKRSAGLVPSWRHIPKSHSS | | |
| | | SILEVDSTASMGGWTKSQPFSG | | |
| | | EEISSKSELDELQEEVARRAQE | | |
| | | QELRRKREKELEAAKGENPHPS | | |
| | | RFMDLDELQNQGRSDGFERSLQ | | |
| | | EAESVFEESLHLEQKGDCAAAL | | |
| | | ALCNEAISKLRLALHGASCSTH | | |
| | | SRALVDKKLQISIRKARSLQDR | | |
| | | MQQQQSPQQPSQPSACLPTQAG | | |
| | | TLSQPTSEQPIPLQ | | |
| | | VLLSQEAQLESGMDTEFGASSF | | |
| | | FHSPASCHESHSSLSPESSAPQ | | |
| | | HSSPSRSALKLLTSVEVDNIEP | | |
| | | SAFHRQGLPKAPGWTEKNSHHS | | |
| | | WEPLDAPEGKLQGSRCDNSSCS | | |
| | | KLPPQEGRGIAQEQLFQEKKDP | | |
| | | ANPSPVMPGIATSERGDEHSLG | | |
| | | CSPSNSSAQPSLPLYRTCHPIM | | |
| | | PVASSFVLHCPDPVQKTNQCLQ | | |
| | | GQSLKTSLTLKVDRGSEETYRP | | |
| | | EFPSTKGLVRSLAEQFQRMQGV | | |
| | | SMRDSTGFKDRSLSGSLRKNSS | | |
| | | PSDSKPPESQGQEKGHWPWAKQ | | |
| | | QSSLEGGDRPLSWE | | |
| | | ESTEHSSLALNSGLPNGETSSG | | |
| | | GQPRLAEPDIYQEKLSQVRDVR | | |
| | | SKDLGSSTDLGTSLPLDSWVNI | | |
| | | TRFCDSQLKHGAPRPGMKSSPH | | |
| | | DSHTCVTYPERNHILLHPHWNQ | | |
| | | DTEQETSELESLYQASLQASQA | | |
| | | GCSGWGQQDTAWHPLSQTGSAD | | |
| | | GMGRRLHSAHDPGLSKTSTAEM | | |
| | | EHGLHEARTVRTSQATPCRGLS | | |
| | | RECGEDEQYSAENLRRISRSLS | | |
| | | GTVVSEREEAPVSSHSEDSSNV | | |
| | | RKPLETGHRCSSSSSLPVIHDP | | |
| | | SVFLLGPQLYLPQPQFLSPDVL | | |
| | | MPTMAGEPNRLPGT | | |
| | | SRSVQQFLAMCDRGETSQGAKY | | |
| | | TGRTLNYQSLPHRSRTDNSWAP | | |
| | | WSETNQHIGTRFLTTPGCNPQL | | |
| | | TYTATLPERSKGLQVPHTQSWS | | |
| | | DLFHSPSHPPIVHPVYPPSSSL | | |
| | | HVPLRSAWNSDPVPGSRTPGPR | | |
| | | RVDMPPDDDWRQSSYASHSGHR | | |
| | | RTVGEGFLFVLSDAPRREQIRA | | |
| | | RVLQHSQW | | |
| SNUT2_HUMAN | 51 | MSGRSKRESRGSTRGKRESESR | 163 | LPGIVGLNNIKANDYANAVL |
| U4/U6.U5 | | GSSGRVKRERDREREPEAASSR | | QALSNVPPLRNYFLEEDNYK |
| tri-snRNP- | | GSPVRVKREFEPASAREAPASV | | NIKRPPGDIMFLLVQRFGEL |
| associated | | VPFVRVKREREVDEDSEPEREV | | MRKLWNPRNFKAHVSPHEML |
| protein 2 | | RAKNGRVDSEDRRSRHCPYLDT | | QAVVLCSKKTFQITKQGDGV |
| | | INRSVLDEDFEKLCSISLSHIN | | DFLSWFLNALHSALGGTKKK |
| | | AYACLVCGKYFQGRGLKSHAYI | | KKTIVTDVFQGSMRIFTKKL |
| | | HSVQFSHHVFLNLHTLKFYCLP | | PHPDLPAEEKEQLLHNDEYQ |
| | | DNYEIIDSSLEDITYVLKPTFT | | ETMVESTFMYLTLDLPTAPL |
| | | KQQIANLDKQAKLSRAYDGTTY | | YKDEKEQLIIPQVPLENILA |
| | | LPGIVGLNNIKANDYANAVLQA | | KFNGITEKEYKTYKENFLKR |
| | | LSNVPPLRNYFLEEDNYKNIKR | | FQLTKLPPYLIFCIKRFTKN |
| | | PPGDIMFLLVQRFGELMRKLWN | | NFFVEKNPTIVNFPITNVDL |
| | | PRNFKAHVSPHEML | | REYLSEEVQAVHKNTTYDLI |
| | | QAVVLCSKKTFQITKQGDGVDF | | ANIVHDGKPSEGSYRIHVLH |
| | | LSWFLNALHSALGGTKKKKKTI | | HGTGKWYELQDLQVTDILPQ |
| | | VTDVFQGSMRIFTKKLPHPDLP | | MITLSEAYIQIWKRRD |
| | | AEEKEQLLHNDEYQETMVESTF | | |
| | | MYLTLDLPTAPLYKDEKEQLII | | |
| | | PQVPLFNILAKFNGITEKEYKT | | |
| | | YKENFLKRFQLTKLPPYLIFCI | | |
| | | KRFTKNNFFVEKNPTIVNEPIT | | |
| | | NVDLREYLSEEVQAVHKNTTYD | | |
| | | LIANIVHDGKPSEGSYRIHVLH | | |
| | | HGTGKWYELQDLQVTDILPQMI | | |
| | | TLSEAYIQIWKRRDNDETNQQG | | |
| | | A | | |
| UBP35_HUMAN | 52 | MDKILEAVVTSSYPVSVKQGLV | 164 | SDTGKIGLINLGNTCYVNSI |
| Ubiquitin | | RRVLEAARQPLEREQCLALLAL | | LQALFMASDERHCVLRLTEN |
| carboxyl- | | GARLYVGGAEELPRRVGCQLLH | | NSQPLMTKLQWLFGFLEHSQ |
| terminal | | VAGRHHPDVFAEFFSARRVLRL | | RPAISPENFLSASWTPWESP |
| hydrolase | | LQGGAGPPGPRALACVQLGLQL | | GTQQDCSEYLKYLLDRLHEE |
| 35 | | LPEGPAADEVFALLRREVLRTV | | EKTGTRICQKLKQSSSPSPP |
| | | CERPGPAACAQVARLLARHPRC | | EEPPAPSSTSVEKMFGGKIV |
| | | VPDGPHRLLFCQQLVRCLGRFR | | TRICCLCCLNVSSREEAFTD |
| | | CPAEGEEGAVEFLEQAQQVSGL | | LSLAFPPPERCRRRRLGSVM |
| | | LAQLWRAQPAAILPCLKELFAV | | RPTEDITARELPPPTSAQGP |
| | | ISCAEEEPPSSALASVVQHLPL | | GRVGPRRQRKHCITEDTPPT |
| | | ELMDGVVRNLSNDDSVTDSQML | | SLYIEGLDSKEAGGQSSQEE |
| | | TAISRMIDWVSWPLGKNIDKWI | | RIEREEEGKEERTEKEEVGE |
| | | IALLKGLAAVKKFS | | EEESTRGEGEREKEEEVEEE |
| | | ILIEVSLTKIEKVESKLLYPIV | | EEKVE |
| | | RGAALSVLKYMLLTFQHSHEAF | | KETEKEAEQEKEEDSLGAGT |
| | | HLLLPHIPPMVASLVKEDSNSG | | HPDAAIPSGERTCGSEGSRS |
| | | TSCLEQLAELVHCMVFRFPGFP | | VLDLVNYFLSPEKLTAENRY |
| | | DLYEPVMEAIKDLHVPNEDRIK | | YCESCASLQDAEKVVELSQG |
| | | QLLGQDAWTSQKSELAGFYPRL | | PCYLILTLLRFSFDLRTMRR |
| | | MAKSDTGKIGLINLGNTCYVNS | | RKILDDVSIPLLLRLPLAGG |
| | | ILQALFMASDFRHCVLRLTENN | | RGQAYDLCSVVVHSGVSSES |
| | | SQPLMTKLQWLFGFLEHSQRPA | | GHYYCYAREGAARPAASLGT |
| | | ISPENFLSASWTPWFSPGTQQD | | ADRPEPENQWYLFNDTRVSF |
| | | CSEYLKYLLDRLHEEEKTGTRI | | SSFESVSNVTSFFPKDTAYV |
| | | CQKLKQSSSPSPPEEPPAPSST | | LFYRQRP |
| | | SVEKMFGGKIVTRICCLCCLNV | | |
| | | SSREEAFTDLSLAF | | |
| | | PPPERCRRRRLGSVMRPTEDIT | | |
| | | ARELPPPTSAQGPGRVGPRRQR | | |
| | | KHCITEDTPPTSLYIEGLDSKE | | |
| | | AGGQSSQEERIEREEEGKEERT | | |
| | | EKEEVGEEEESTRGEGEREKEE | | |
| | | EVEEEEEKVEKETEKEAEQEKE | | |
| | | EDSLGAGTHPDAAIPSGERTCG | | |
| | | SEGSRSVLDLVNYFLSPEKLTA | | |
| | | ENRYYCESCASLQDAEKVVELS | | |
| | | QGPCYLILTLLRFSFDLRTMRR | | |
| | | RKILDDVSIPLLLRLPLAGGRG | | |
| | | QAYDLCSVVVHSGVSSESGHYY | | |
| | | CYAREGAARPAASLGTADRPEP | | |
| | | ENQWYLFENDTRVSF | | |
| | | SSFESVSNVTSFFPKDTAYVLF | | |
| | | YRQRPREGPEAELGSSRVRTEP | | |
| | | TLHKDLMEAISKDNILYLQEQE | | |
| | | KEARSRAAYISALPTSPHWGRG | | |
| | | FDEDKDEDEGSPGGCNPAGGNG | | |
| | | GDFHRLVF | | |
| UBP15_HUMAN | 53 | MAEGGAADLDTQRSDIATLLKT | 165 | EQPGLCGLSNLGNTCFMNSA |
| Ubiquitin | | SLRKGDTWYLVDSRWFKQWKKY | | IQCLSNTPPLTEYFLNDKYQ |
| carboxyl- | | VGFDSWDKYQMGDQNVYPGPID | | EELNFDNPLGMRGEIAKSYA |
| terminal | | NSGLLKDGDAQSLKEHLIDELD | | ELIKQMWSGKFSYVTPRAFK |
| hydrolase | | YILLPTEGWNKLVSWYTLMEGQ | | TQVGRFAPQFSGYQQQDCQE |
| 15 | | EPIARKVVEQGMFVKHCKVEVY | | LLAFLLDGLHEDLNRIRKKP |
| | | LTELKLCENGNMNNVVTRRFSK | | YIQLKDADGRPDKVVAEEAW |
| | | ADTIDTIEKEIRKIFSIPDEKE | | ENHLKRNDSIIVDIFHGLFK |
| | | TRLWNKYMSNTFEPLNKPDSTI | | STLVCPECAKISVTFDPFCY |
| | | QDAGLYQGQVLVIEQKNEDGTW | | LTLPLPMKKERTLEVYLVRM |
| | | PRGPSTPKSPGASNFSTLPKIS | | DPLTKPMQYKVVVPKIGNIL |
| | | PSSLSNNYNNMNNRNVKNSNYC | | DLCTALSALSGIPADKMIVT |
| | | LPSYTAYKNYDYSEPGRNNEQP | | DIYNHRFHRIFAMDENLSSI |
| | | GLCGLSNLGNTCFM | | MERDDIYVFEININRTEDTE |
| | | NSAIQCLSNTPPLTEYFLNDKY | | HVIIPVCLREKFRHSSYTHH |
| | | QEELNFDNPLGMRGEIAKSYAE | | TGSSLFGQPFLMAVPRNNTE |
| | | LIKQMWSGKFSYVTPRAFKTQV | | DKLYNLLLLRMCRYVKISTE |
| | | GRFAPQFSGYQQQDCQELLAFL | | TEETEGSLHCCKDQNINGNG |
| | | LDGLHEDLNRIRKKPYIQLKDA | | PNGIHEEGSPSEMETDEPDD |
| | | DGRPDKVVAEEAWENHLKRNDS | | ESSQDQELPSENENSQSEDS |
| | | IIVDIFHGLFKSTLVCPECAKI | | VGGDNDSENGLCTEDTCKGQ |
| | | SVTFDPFCYLTLPLPMKKERTL | | LTGHKKRLFTFQFNNLGNTD |
| | | EVYLVRMDPLTKPMQYKVVVPK | | INYIKDDTRHIRFDDRQLRL |
| | | IGNILDLCTALSALSGIPADKM | | DERSFLALDWDPDLKKRYFD |
| | | IVTDIYNHRFHRIFAMDENLSS | | ENAAEDFEKHESVEYKPPKK |
| | | IMERDDIYVFEININRTEDTEH | | PFVKLKDCIELFTTKEKLGA |
| | | VIIPVCLREKFRHSSYTHHTGS | | EDPWYCPNCKEHQQATKKLD |
| | | SLFGQPFLMAVPRN | | LWSLPPVLVVHLKRFSYSRY |
| | | NTEDKLYNLLLLRMCRYVKIST | | MRDKLDTLVDFPINDLDMSE |
| | | ETEETEGSLHCCKDQNINGNGP | | FLINPNAGPCRYNLIAVSNH |
| | | NGIHEEGSPSEMETDEPDDESS | | YGGMGGGHYTAFAKNKDDGK |
| | | QDQELPSENENSQSEDSVGGDN | | WYYFDDSSVSTASEDQIVSK |
| | | DSENGLCTEDTCKGQLTGHKKR | | AAYVLFYQRQD |
| | | LFTFQFNNLGNTDINYIKDDTR | | |
| | | HIRFDDRQLRLDERSFLALDWD | | |
| | | PDLKKRYFDENAAEDFEKHESV | | |
| | | EYKPPKKPFVKLKDCIELFTTK | | |
| | | EKLGAEDPWYCPNCKEHQQATK | | |
| | | KLDLWSLPPVLVVHLKRFSYSR | | |
| | | YMRDKLDTLVDFPINDLDMSEF | | |
| | | LINPNAGPCRYNLIAVSNHYGG | | |
| | | MGGGHYTAFAKNKD | | |
| | | DGKWYYFDDSSVSTASEDQIVS | | |
| | | KAAYVLFYQRQDTFSGTGFFPL | | |
| | | DRETKGASAATGIPLESDEDSN | | |
| | | DNDNDIENENCMHTN | | |
| UBP29_HUMAN | 54 | MISLKVCGFIQIWSQKTGMTKL | 166 | QLQQGFPNLGNTCYMNAVLQ |
| Ubiquitin | | KEALIETVQRQKEIKLVVTFKS | | SLFAIPSFADDLLTQGVPWE |
| carboxyl- | | GKFIRIFQLSNNIRSVVLRHCK | | YIPFEALIMTLTQLLALKDF |
| terminal | | KRQSHLRLTLKNNVFLFIDKLS | | CSTKIKRELLGNVKKVISAV |
| hydrolase | | YRDAKQLNMFLDIIHQNKSQQP | | AEIFSGNMQNDAHEFLGQCL |
| 29 | | MKSDDDWSVFESRNMLKEIDKT | | DQLKEDMEKLNATLNTGKEC |
| | | SFYSICNKPSYQKMPLFMSKSP | | GDENSSPQMHVGSAATKVFV |
| | | THVKKGILENQGGKGQNTLSSD | | CPVVANFEFELQLSLICKAC |
| | | VQTNEDILKEDNPVPNKKYKTD | | GHAVLKVEPNNYLSINLHQE |
| | | SLKYIQSNRKNPSSLEDLEKDR | | TKPLPLSIQNSLDLFFKEEE |
| | | DLKLGPSFNTNCNGNPNLDETV | | LEYNCQMCKQKSCVARHTFS |
| | | LATQTLNAKNGLTSPLEPEHSQ | | RLSRVLIIHLKRYSFNNAWL |
| | | GDPRCNKAQVPLDSHSQQLQQG | | LVKNNEQVYIPKSLSLSSYC |
| | | FPNLGNTCYMNAVL | | NESTKPPLPLSSSAPVGKCE |
| | | QSLFAIPSFADDLLTQGVPWEY | | VLEVSQEMISEINSPLTPSM |
| | | IPFEALIMTLTQLLALKDFCST | | KLTSESSDSLVLPVEPDKNA |
| | | KIKRELLGNVKKVISAVAEIFS | | DLQRFQRDCGDASQEQHQRD |
| | | GNMQNDAHEFLGQCLDQLKEDM | | LENGSALESELVHFRDRAIG |
| | | EKLNATLNTGKECGDENSSPQM | | EKELPVADSLMDQGDISLPV |
| | | HVGSAATKVFVCPVVANFEFEL | | MYEDGGKLISSPDTRLVEVH |
| | | QLSLICKACGHAVLKVEPNNYL | | LQEVPQHPELQKYEKTNTFV |
| | | SINLHQETKPLPLSIQNSLDLF | | EFNFDSVTESTNGFYDCKEN |
| | | FKEEELEYNCQMCKQKSCVARH | | RIPEGSQGMAEQLQQCIEES |
| | | TFSRLSRVLIIHLKRYSFNNAW | | IIDEFLQQAPPPGVRKLDAQ |
| | | LLVKNNEQVYIPKSLSLSSYCN | | EHTEETLNQSTELRLQKADL |
| | | ESTKPPLPLSSSAPVGKCEVLE | | NHLGALGSDNPGNKNILDAE |
| | | VSQEMISEINSPLTPSMKLTSE | | NTRGEAKELTRNVKMGDPLQ |
| | | SSDSLVLPVEPDKN | | AYRLISVVSHIGSSPNSGHY |
| | | ADLQRFQRDCGDASQEQHQRDL | | ISDVYDFQKQAWFTYNDLCV |
| | | ENGSALESELVHFRDRAIGEKE | | SEISETKMQEARLHSGYIFF |
| | | LPVADSLMDQGDISLPVMYEDG | | YMHN |
| | | GKLISSPDTRLVEVHLQEVPQH | | |
| | | PELQKYEKTNTFVEFNFDSVTE | | |
| | | STNGFYDCKENRIPEGSQGMAE | | |
| | | QLQQCIEESIIDEFLQQAPPPG | | |
| | | VRKLDAQEHTEETLNQSTELRL | | |
| | | QKADLNHLGALGSDNPGNKNIL | | |
| | | DAENTRGEAKELTRNVKMGDPL | | |
| | | QAYRLISVVSHIGSSPNSGHYI | | |
| | | SDVYDFQKQAWFTYNDLCVSEI | | |
| | | SETKMQEARLHSGYIFFYMHNG | | |
| | | IFEELLRKAENSRLPSTQAGVI | | |
| | | PQGEYEGDSLYRPA | | |
| UBP6_HUMAN | 55 | MDMVENADSLQAQERKDILMKY | 167 | KGATGLSNLGNTCFMNSSIQ |
| Ubiquitin | | DKGHRAGLPEDKGPEPVGINSS | | CVSNTQPLTQYFISGRHLYE |
| carboxyl- | | IDRFGILHETELPPVTAREAKK | | LNRTNPIGMKGHMAKCYGDL |
| terminal | | IRREMTRTSKWMEMLGEWETYK | | VQELWSGTQKSVAPLKLRRT |
| hydrolase | | HSSKLIDRVYKGIPMNIRGPVW | | IAKYAPKFDGFQQQDSQELL |
| 6 | | SVLLNIQEIKLKNPGRYQIMKE | | AFLLDGLHEDLNRVHEKPYV |
| | | RGKRSSEHIHHIDLDVRTTLRN | | ELKDSDGRPDWE |
| | | HVFFRDRYGAKQRELFYILLAY | | VAAEAWDNHLRRNRSIIVDL |
| | | SEYNPEVGYCRDLSHITALFLL | | FHGQLRSQVKCKTCGHISVR |
| | | YLPEEDAFWALVQLLASERHSL | | FDPNFLSLPLPMDSYMDLEI |
| | | PGFHSPNGGTVQGLQDQQEHVV | | TVIKLDGTTPVRYGLRLNMD |
| | | PKSQPKTMWHQDKEGLCGQCAS | | EKYTGLKKQLRDLCGLNSEQ |
| | | LGCLLRNLIDGISLGLTLRLWD | | ILLAEVHDSNIKNFPQDNQK |
| | | VYLVEGEQVLMPIT | | VQLSVSGELCAFEIPVPSSP |
| | | SIALKVQQKRLMKTSRCGLWAR | | ISASSPTQIDFSSSPSTNGM |
| | | LRNQFFDTWAMNDDTVLKHLRA | | FTLTTNGDLPKPIFIPNGMP |
| | | STKKLTRKQGDLPPPAKREQGS | | NTVVPCGTEKNFTNGMVNGH |
| | | LAPRPVPASRGGKTLCKGYRQA | | MPSLPDSPFTGYIIAVHRKM |
| | | PPGPPAQFQRPICSASPPWASR | | MRTELYFLSPQENRPSLFGM |
| | | FSTPCPGGAVREDTYPVGTQGV | | PLIVPCTVHTRKKDLYDAVW |
| | | PSLALAQGGPQGSWRFLEWKSM | | IQVSWLARPLPPQEASIHAQ |
| | | PRLPTDLDIGGPWFPHYDFEWS | | DRDNCMGYQYPFTLRVVQKD |
| | | CWVRAISQEDQLATCWQAEHCG | | GNSCAWCPQYRFCRGCKIDC |
| | | EVHNKDMSWPEEMSFTANSSKI | | GEDRAFIGNAYIAVDWHPTA |
| | | DRQKVPTEKGATGLSNLGNTCF | | LHLRYQTSQERVVDKHESVE |
| | | MNSSIQCVSNTQPLTQYFISGR | | QSRRAQAEPINLDSCLRAFT |
| | | HLYELNRTNPIGMKGHMAKCYG | | SEEELGESEMYYCSKCKTHC |
| | | DLVQELWSGTQKSV | | LATKKLDLWRLPPFLIIHLK |
| | | APLKLRRTIAKYAPKFDGFQQQ | | RFQFVNDQWIKSQKIVRFLR |
| | | DSQELLAFLLDGLHEDLNRVHE | | ESFDPSAFLVPRDPALCQHK |
| | | KPYVELKDSDGRPDWEVAAEAW | | PLTPQGDELSKPRILAREVK |
| | | DNHLRRNRSIIVDLFHGQLRSQ | | KVDAQSSAGKEDMLLSKSPS |
| | | VKCKTCGHISVRFDPFNFLSLP | | SLSANISSSPKGSPSSSRKS |
| | | LPMDSYMDLEITVIKLDGTTPV | | GTSCPSSKNSSPNSSPRTLG |
| | | RYGLRLNMDEKYTGLKKQLRDL | | RSKGRLRLPQIGSKNKPSSS |
| | | CGLNSEQILLAEVHDSNIKNFP | | KKNLDASKENGAGQICELAD |
| | | QDNQKVQLSVSGFLCAFEIPVP | | ALSRGHMRGGSQPELVTPQD |
| | | SSPISASSPTQIDFSSSPSTNG | | HEVALANGFLYEHEACGNGC |
| | | MFTLTINGDLPKPIFIPNGMPN | | GDGYSNGQLGNHSEEDSTDD |
| | | TVVPCGTEKNFTNGMVNGHMPS | | QREDTHIKPIYNLYAISCHS |
| | | LPDSPFTGYIIAVHRKMMRTEL | | GILSGGHYITYAKNPNCKWY |
| | | YFLSPQENRPSLFG | | CYNDSSCEELHPDEIDTDSA |
| | | MPLIVPCTVHTRKKDLYDAVWI | | YILFYEQQG |
| | | QVSWLARPLPPQEASIHAQDRD | | |
| | | NCMGYQYPFTLRVVQKDGNSCA | | |
| | | WCPQYRFCRGCKIDCGEDRAFI | | |
| | | GNAYIAVDWHPTALHLRYQTSQ | | |
| | | ERVVDKHESVEQSRRAQAEPIN | | |
| | | LDSCLRAFTSEEELGESEMYYC | | |
| | | SKCKTHCLATKKLDLWRLPPFL | | |
| | | IIHLKRFQFVNDQWIKSQKIVR | | |
| | | FLRESFDPSAFLVPRDPALCQH | | |
| | | KPLTPQGDELSKPRILAREVKK | | |
| | | VDAQSSAGKEDMLLSKSPSSLS | | |
| | | ANISSSPKGSPSSSRKSGTSCP | | |
| | | SSKNSSPNSSPRTL | | |
| | | GRSKGRLRLPQIGSKNKPSSSK | | |
| | | KNLDASKENGAGQICELADALS | | |
| | | RGHMRGGSQPELVTPQDHEVAL | | |
| | | ANGFLYEHEACGNGCGDGYSNG | | |
| | | QLGNHSEEDSTDDQREDTHIKP | | |
| | | IYNLYAISCHSGILSGGHYITY | | |
| | | AKNPNCKWYCYNDSSCEELHPD | | |
| | | EIDTDSAYILFYEQQGIDYAQF | | |
| | | LPKIDGKKMADTSSTDEDSESD | | |
| | | YEKYSMLQ | | |
| UBP53_HUMAN | 56 | MAWVKFLRKPGGNLGKVYQPGS | 168 | APTKGLLNEPGQNSCFLNSA |
| Inactive | | MLSLAPTKGLLNEPGQNSCFLN | | VQVLWQLDIFRRSLRVLTGH |
| ubiquitin | | SAVQVLWQLDIFRRSLRVLTGH | | VCQGDACIFCALKTIFAQFQ |
| carboxyl- | | VCQGDACIFCALKTIFAQFQHS | | HSREKALPSDNIRHALAESF |
| terminal | | REKALPSDNIRHALAESFKDEQ | | KDEQRFQLGLMDDAAECFEN |
| hydrolase | | RFQLGLMDDAAECFENMLERIH | | MLERIHFHIVPSRDADMCTS |
| 53 | | FHIVPSRDADMCTSKSCITHQK | | KSCITHQKFAMTLYEQCVCR |
| | | FAMTLYEQCVCRSCGASSDPLP | | SCGASSDPLPFTEFVRYIST |
| | | FTEFVRYISTTALCNEVERMLE | | TALCNEVERMLERHERFKPE |
| | | RHERFKPEMFAELLQAANTTDD | | MFAELLQAANTTDDYRKCPS |
| | | YRKCPSNCGQKIKIRRVLMNCP | | NCGQKIKIRRVLMNCPEIVT |
| | | EIVTIGLVWDSEHSDLTEAVVR | | IGLVWDSEHSDLTEAVVRNL |
| | | NLATHLYLPGLFYRVTDENAKN | | ATHLYLPGLFYRVTDENAKN |
| | | SELNLVGMICYTSQ | | SELNLVGMICYTSQHYCAFA |
| | | HYCAFAFHTKSSKWVFFDDANV | | FHTKSSKWVFFDDANVKEIG |
| | | KEIGTRWKDVVSKCIRCHFQPL | | TRWKDVVSKCIRCHFQPLLL |
| | | LLFYANPDGTAVSTEDALRQVI | | FYANPDGTAVSTEDALRQVI |
| | | SWSHYKSVAENMGCEKPVIHKS | | SWSHYKSVAENMGCEKPVIH |
| | | DNLKENGFGDQAKQRENQKFPT | | KSDNLKENGFGDQAKQRENQ |
| | | DNISSSNRSHSHTGVGKGPAKL | | KFPTDNISSSNRSHSHTGVG |
| | | SHIDQREKIKDISRECALKAIE | | KGPAKLSHIDQREKIKDISR |
| | | QKNLLSSQRKDLEKGQRKDLGR | | ECALKAIEQKNLLSSQRKDL |
| | | HRDLVDEDLSHFQSGSPPAPNG | | EKGQRK |
| | | FKQHGNPHLYHSQGKGSYKHDR | | |
| | | VVPQSRASAQIISSSKSQILAP | | |
| | | GEKITGKVKSDNGTGYDTDSSQ | | |
| | | DSRDRGNSCDSSSKSRNRGWKP | | |
| | | MRETLNVDSIFSES | | |
| | | EKRQHSPRHKPNISNKPKSSKD | | |
| | | PSFSNWPKENPKQKGLMTIYED | | |
| | | EMKQEIGSRSSLESNGKGAEKN | | |
| | | KGLVEGKVHGDNWQMQRTESGY | | |
| | | ESSDHISNGSTNLDSPVIDGNG | | |
| | | TVMDISGVKETVCFSDQITTSN | | |
| | | LNKERGDCTSLQSQHHLEGFRK | | |
| | | ELRNLEAGYKSHEFHPESHLQI | | |
| | | KNHLIKRSHVHEDNGKLFPSSS | | |
| | | LQIPKDHNAREHIHQSDEQKLE | | |
| | | KPNECKFSEWLNIENSERTGLP | | |
| | | FHVDNSASGKRVNSNEPSSLWS | | |
| | | SHLRTVGLKPETAPLIQQQNIM | | |
| | | DQCYFENSLSTECI | | |
| | | IRSASRSDGCQMPKLFCQNLPP | | |
| | | PLPPKKYAITSVPQSEKSESTP | | |
| | | DVKLTEVFKATSHLPKHSLSTA | | |
| | | SEPSLEVSTHMNDERHKETFQV | | |
| | | RECFGNTPNCPSSSSTNDFQAN | | |
| | | SGAIDAFCQPELDSISTCPNET | | |
| | | VSLTTYFSVDSCMTDTYRLKYH | | |
| | | QRPKLSFPESSGFCNNSLS | | |
| U17LO_HUMAN | 57 | MEDDSLYLRGEWQFNHFSKLTS | 169 | AVGAGLQNMGNTCYVNASLQ |
| Ubiquitin | | SRPDAAFAEIQRTSLPEKSPLS | | CLTYTPPLANYMLSREHSQT |
| carboxyl- | | CETRVDLCDDLAPVARQLAPRE | | CHRHKGCMLCTMQAHITRAL |
| terminal | | KLPLSSRRPAAVGAGLQNMGNT | | HNPGHVIQPSQALAAGFHRG |
| hydrolase | | CYVNASLQCLTYTPPLANYMLS | | KQEDAHEFLMFTVDAMKKAC |
| 17-like | | REHSQTCHRHKGCMLCTMQAHI | | LPGHKQVDHHSKDTTLIHQI |
| protein 24 | | TRALHNPGHVIQPSQALAAGFH | | FGGYWRSQIKCLHCHGISDT |
| | | RGKQEDAHEFLMFTVDAMKKAC | | FDPYLDIALDIQAAQSVQQA |
| | | LPGHKQVDHHSKDTTLIHQIFG | | LEQLVKPEELNGENAYHCGV |
| | | GYWRSQIKCLHCHGISDTFDPY | | CLQRAPASKTLTLHTSAKVL |
| | | LDIALDIQAAQSVQQALEQLVK | | ILVLKRFSDVTGNKIAKNVQ |
| | | PEELNGENAYHCGVCLQRAPAS | | YPECLDMQPYMSQPNTGPLV |
| | | KTLTLHTSAKVLILVLKRFSDV | | YVLYAVLVHAGWSCHNGHYF |
| | | TGNKIAKNVQYPEC | | SYVKAQEGQWYKMDDAEVTA |
| | | LDMQPYMSQPNTGPLVYVLYAV | | SSITSVLSQQAYVLFYIQKS |
| | | LVHAGWSCHNGHYFSYVKAQEG | | |
| | | QWYKMDDAEVTASSITSVLSQQ | | |
| | | AYVLFYIQKSEWERHSESVSRG | | |
| | | REPRALGAEDTDRRATQGELKR | | |
| | | DHPCLQAPELDEHLVERATQES | | |
| | | TLDHWKFLQEQNKTKPEFNVRK | | |
| | | VEGTLPPDVLVIHQSKYKCGMK | | |
| | | NHHPEQQSSLLNLSSSTPTHQE | | |
| | | SMNTGTLASLRGRARRSKGKNK | | |
| | | HSKRALLVCQ | | |
| U17LM_HUMAN | | MEDDSLYLGGEWQFNHESKLTS | | AVGAGLQNMGNTCYVNASLQ |
| Ubiquitin | | SRPDAAFAEIQRTSLPEKSPLS | | CLTYTPPLANYMLSREHSQT |
| carboxyl- | | CETRVDLCDDLAPVARQLAPRE | | CHRHKGCMLCTMQAHITRAL |
| terminal | | KLPLSSRRPAAVGAGLQNMGNT | | HNPGHVIQPSQALAAGFHRG |
| hydrolase | | CYVNASLQCLTYTPPLANYMLS | | KQEDAHEFLMFTVDAMKKAC |
| 17-like | | REHSQTCHRHKGCMLCTMQAHI | | LPGHKQVDHHSKDTTLIHQI |
| protein 22 | | TRALHNPGHVIQPSQALAAGFH | | FGGYWRSQIKCLHCHGISDT |
| | | RGKQEDAHEFLMFTVDAMKKAC | | FDPYLDIALDIQAAQSVQQA |
| | | LPGHKQVDHHSKDTTLIHQIFG | | LEQLVKPEELNGENAYHCGV |
| | | GYWRSQIKCLHCHGISDTFDPY | | CLQRAPASKTLTLHTSAKVL |
| | | LDIALDIQAAQSVQQALEQLVK | | ILVLKRFSDVTGNKIAKNVQ |
| | | PEELNGENAYHCGVCLQRAPAS | | YPECLDMQPYMSQQNTGPLV |
| | | KTLTLHTSAKVLILVLKRFSDV | | YVLYAVLVHAGWSCHNGHYF |
| | | TGNKIAKNVQYPEC | | SYVKAQEGQWYKMDDAEVTA |
| | | LDMQPYMSQQNTGPLVYVLYAV | | SSITSVLSQQAYVLFYIQKS |
| | | LVHAGWSCHNGHYFSYVKAQEG | | |
| | | QWYKMDDAEVTASSITSVLSQQ | | |
| | | AYVLFYIQKSEWERHSESVSRG | | |
| | | REPRALGAEDTDRRATQGELKR | | |
| | | DHPCLQAPELDEHLVERATQES | | |
| | | TLDHWKFLQEQNKTKPEFNVRK | | |
| | | VEGTLPPDVLVIHQSKYKCGMK | | |
| | | NHHPEQQSSLLKLSSTTPTHQE | | |
| | | SMNTGTLASLRGRARRSKGKNK | | |
| | | HSKRALLVCQ | | |
| UBP5_HUMAN | 58 | MAELSEEALLSVLPTIRVPKAG | 170 | FGPGYTGIRNLGNSCYLNSV |
| Ubiquitin | | DRVHKDECAFSFDTPESEGGLY | | VQVLESIPDFQRKYVDKLEK |
| carboxyl- | | ICMNTFLGFGKQYVERHENKTG | | IFQNAPTDPTQDFSTQVAKL |
| terminal | | QRVYLHLRRTRRPKEEDPATGT | | GHGLLSGEYSKPVPESGDGE |
| hydrolase | | GDPPRKKPTRLAIGVEGGFDLS | | RVPEQKEVQDGIAPRMFKAL |
| 5 | | EEKFELDEDVKIVILPDYLEIA | | IGKGHPEFSTNRQQDAQEFF |
| | | RDGLGGLPDIVRDRVTSAVEAL | | LHLINMVERNCRSSENPNEV |
| | | LSADSASRKQEVQAWDGEVRQV | | FRFLVEEKIKCLATEKVKYT |
| | | SKHAFSLKQLDNPARIPPCGWK | | QRVDYIMQLPVPMDAALNKE |
| | | CSKCDMRENLWLNLTDGSILCG | | ELLEYEEKKRQAEEEKMALP |
| | | RRYFDGSGGNNHAVEHYRETGY | | ELVRAQVPFSSCLEAYGAPE |
| | | PLAVKLGTITPDGADVYSYDED | | QVDDFWSTALQAKSVAVKTT |
| | | DMVLDPSLAEHLSHFGIDMLKM | | RFASFPDYLVIQIKKFTFGL |
| | | QKTDKTMTELEIDM | | DWVPKKLDVSIEMPEELDIS |
| | | NQRIGEWELIQESGVPLKPLFG | | QLRGTGLQPGEEELPDIAPP |
| | | PGYTGIRNLGNSCYLNSVVQVL | | LVTPDEPKGSLGFYGNEDED |
| | | FSIPDFQRKYVDKLEKIFQNAP | | SFCSPHFSSPTSPMLDESVI |
| | | TDPTQDFSTQVAKLGHGLLSGE | | IQLVEMGFPMDACRKAVYYT |
| | | YSKPVPESGDGERVPEQKEVQD | | GNSGAEAAMNWVMSHMDDPD |
| | | GIAPRMFKALIGKGHPEFSTNR | | FANPLILPGSSGPGSTSAAA |
| | | QQDAQEFFLHLINMVERNCRSS | | DPPPEDCVTTIVSMGFSRDQ |
| | | ENPNEVFRFLVEEKIKCLATEK | | ALKALRATNNSLERAVDWIF |
| | | VKYTQRVDYIMQLPVPMDAALN | | SHIDDLDAEAAMDISEGRSA |
| | | KEELLEYEEKKRQAEEEKMALP | | ADSISESVPVGPKVRDGPGK |
| | | ELVRAQVPESSCLEAYGAPEQV | | YQLFAFISHMGTSTMCGHYV |
| | | DDFWSTALQAKSVAVKTTRFAS | | CHIKKEGRWVIYNDQKVCAS |
| | | FPDYLVIQIKKFTFGLDWVPKK | | EKPPKDLGYIYFYQRVA |
| | | LDVSIEMPEELDIS | | |
| | | QLRGTGLQPGEEELPDIAPPLV | | |
| | | TPDEPKGSLGFYGNEDEDSFCS | | |
| | | PHFSSPTSPMLDESVIIQLVEM | | |
| | | GFPMDACRKAVYYTGNSGAEAA | | |
| | | MNWVMSHMDDPDFANPLILPGS | | |
| | | SGPGSTSAAADPPPEDCVTTIV | | |
| | | SMGFSRDQALKALRATNNSLER | | |
| | | AVDWIFSHIDDLDAEAAMDISE | | |
| | | GRSAADSISESVPVGPKVRDGP | | |
| | | GKYQLFAFISHMGTSTMCGHYV | | |
| | | CHIKKEGRWVIYNDQKVCASEK | | |
| | | PPKDLGYIYFYQRVAS | | |
| UBP25_HUMAN | 59 | MTVEQNVLQQSAAQKHQQTFLN | | KAPVGLKNVGNTCWFSAVIQ |
| Ubiquitin | | QLREITGINDTQILQQALKDSN | | SLFNLLEFRRLVLNYKPPSN |
| carboxyl- | | GNLELAVAFLTAKNAKTPQQEE | | AQDLPRNQKEHRNLPFMREL |
| terminal | | TTYYQTALPGNDRYISVGSQAD | | RYLFALLVGTKRKYVDPSRA |
| hydrolase | | TNVIDLTGDDKDDLQRAIALSL | | VEILKDAFKSNDSQQQDVSE |
| 25 | | AESNRAFRETGITDEEQAISRV | | FTHKLLDWLEDAFQMKAEEE |
| | | LEASIAENKACLKRTPTEVWRD | | TDEEKPKNPMVELFYGRFLA |
| | | SRNPYDRKRQDKAPVGLKNVGN | | VGVLEGKKFENTEMFGQYPL |
| | | TCWFSAVIQSLFNLLEFRRLVL | | QVNGFKDLHECLEAAMIEGE |
| | | NYKPPSNAQDLPRNQKEHRNLP | | IESLHSENSGKSGQEHWFTE |
| | | FMRELRYLFALLVGTKRKYVDP | | LPPVLTFELSRFEFNQALGR |
| | | SRAVEILKDAFKSNDSQQQDVS | | PEKIHNKLEFPQVLYLDRYM |
| | | EFTHKLLDWLEDAFQMKAEEET | | HRNREITRIKREEIKRLKDY |
| | | DEEKPKNPMVELFY | | LTVLQQRLERYLSYGSGPKR |
| | | GRFLAVGVLEGKKFENTEMFGQ | | FPLVDVLQYALEFASSKPVC |
| | | YPLQVNGFKDLHECLEAAMIEG | | TSPVDDIDASSPPSGSIPSQ |
| | | EIESLHSENSGKSGQEHWFTEL | | TLPSTTEQQGALSSELPSTS |
| | | PPVLTFELSRFEFNQALGRPEK | | PSSVAAISSRSVIHKPFTQS |
| | | IHNKLEFPQVLYLDRYMHRNRE | | RIPPDLPMHPAPRHITEEEL |
| | | ITRIKREEIKRLKDYLTVLQQR | | SVLESCLHRWRTEIENDTRD |
| | | LERYLSYGSGPKRFPLVDVLQY | | LQESISRIHRTIELMYSDKS |
| | | ALEFASSKPVCTSPVDDIDASS | | MIQVPYRLHAVLVHEGQANA |
| | | PPSGSIPSQTLPSTTEQQGALS | | GHYWAYIFDHRESRWMKYND |
| | | SELPSTSPSSVAAISSRSVIHK | | IAVTKSSWEELVRDSFGGYR |
| | | PFTQSRIPPDLPMHPAPRHITE | | NAS |
| | | EELSVLESCLHRWRTEIENDTR | | |
| | | DLQESISRIHRTIELMYSDKSM | | |
| | | IQVPYRLHAVLVHE | | |
| | | GQANAGHYWAYIFDHRESRWMK | | |
| | | YNDIAVTKSSWEELVRDSFGGY | | |
| | | RNASAYCLMYINDKAQFLIQEE | | |
| | | FNKETGQPLVGIETLPPDLRDF | | |
| | | VEEDNQRFEKELEEWDAQLAQK | | |
| | | ALQEKLLASQKLRESETSVTTA | | |
| | | QAAGDPEYLEQPSRSDESKHLK | | |
| | | EETIQIITKASHEHEDKSPETV | | |
| | | LQSAIKLEYARLVKLAQEDTPP | | |
| | | ETDYRLHHVVVYFIQNQAPKKI | | |
| | | IEKTLLEQFGDRNLSFDERCHN | | |
| | | IMKVAQAKLEMIKPEEVNLEEY | | |
| | | EEWHQDYRKFRETTMYLIIGLE | | |
| | | NFQRESYIDSLLFL | | |
| | | ICAYQNNKELLSKGLYRGHDEE | | |
| | | LISHYRRECLLKLNEQAAELFE | | |
| | | SGEDREVNNGLIIMNEFIVPEL | | |
| | | PLLLVDEMEEKDILAVEDMRNR | | |
| | | WCSYLGQEMEPHLQEKLTDFLP | | |
| | | KLLDCSMEIKSFHEPPKLPSYS | | |
| | | THELCERFARIMLSLSRTPADG | | |
| | | R | | |
| UBP33_HUMAN | 60 | MTGSNSHITILTLKVLPHFESL | 171 | ARGLTGLKNIGNTCYMNAAL |
| Ubiquitin | | GKQEKIPNKMSAFRNHCPHLDS | | QALSNCPPLTQFFLDCGGLA |
| carboxyl- | | VGEITKEDLIQKSLGTCQDCKV | | RTDKKPAICKSYLKLMTELW |
| terminal | | QGPNLWACLENRCSYVGCGESQ | | HKSRPGSVVPTTLFQGIKTV |
| hydrolase | | VDHSTIHSQETKHYLTVNLTTL | | NPTFRGYSQQDAQEFLRCLM |
| 33 | | RVWCYACSKEVFLDRKLGTQPS | | DLLHEELKEQVMEVEEDPQT |
| | | LPHVRQPHQIQENSVQDFKIPS | | ITTEETMEEDKSQSDVDFQS |
| | | NTTLKTPLVAVFDDLDIEADEE | | CESCSNSDRAENENGSRCFS |
| | | DELRARGLTGLKNIGNTCYMNA | | EDNNETTMLIQDDENNSEMS |
| | | ALQALSNCPPLTQFFLDCGGLA | | KDWQKEKMCNKINKVNSEGE |
| | | RTDKKPAICKSYLKLMTELWHK | | FDKDRDSISETVDLNNQETV |
| | | SRPGSVVPTTLFQGIKTVNPTF | | KVQIHSRASEYITDVHSNDL |
| | | RGYSQQDAQEFLRCLMDLLHEE | | STPQILPSNEGVNPRLSASP |
| | | LKEQVMEVEEDPQT | | PKSGNLWPGLAPPHKKAQSA |
| | | ITTEETMEEDKSQSDVDFQSCE | | SPKRKKQHKKYRSVISDIFD |
| | | SCSNSDRAENENGSRCFSEDNN | | GTIISSVQCLTCDRVSVTLE |
| | | ETTMLIQDDENNSEMSKDWQKE | | TFQDLSLPIPGKEDLAKLHS |
| | | KMCNKINKVNSEGEFDKDRDSI | | SSHPTSIVKAGSCGEAYAPQ |
| | | SETVDLNNQETVKVQIHSRASE | | GWIAFFMEYVKRFVVSCVPS |
| | | YITDVHSNDLSTPQILPSNEGV | | WFWGPVVTLQDCLAAFFARD |
| | | NPRLSASPPKSGNLWPGLAPPH | | ELKGDNMYSCEKCKKLRNGV |
| | | KKAQSASPKRKKQHKKYRSVIS | | KFCKVQNFPEILCIHLKRFR |
| | | DIFDGTIISSVQCLTCDRVSVT | | HELMFSTKISTHVSFPLEGL |
| | | LETFQDLSLPIPGKEDLAKLHS | | DLQPFLAKDSPAQIVTYDLL |
| | | SSHPTSIVKAGSCGEAYAPQGW | | SVICHHGTASSGHYIAYCRN |
| | | IAFFMEYVKRFVVSCVPSWFWG | | NLNNLWYEFDDQSVTEVSES |
| | | PVVTLQDCLAAFFARDELKGDN | | TVQNAEAYVLFYRKSS |
| | | MYSCEKCKKLRNGV | | |
| | | KFCKVQNFPEILCIHLKRFRHE | | |
| | | LMFSTKISTHVSFPLEGLDLQP | | |
| | | FLAKDSPAQIVTYDLLSVICHH | | |
| | | GTASSGHYIAYCRNNLNNLWYE | | |
| | | FDDQSVTEVSESTVQNAEAYVL | | |
| | | FYRKSSEEAQKERRRISNLLNI | | |
| | | MEPSLLQFYISRQWLNKFKTFA | | |
| | | EPGPISNNDFLCIHGGVPPRKA | | |
| | | GYIEDLVLMLPQNIWDNLYSRY | | |
| | | GGGPAVNHLYICHTCQIEAEKI | | |
| | | EKRRKTELEIFIRLNRAFQKED | | |
| | | SPATFYCISMQWFREWESFVKG | | |
| | | KDGDPPGPIDNTKIAVTKCGNV | | |
| | | MLRQGADSGQISEETWNFLQSI | | |
| | | YGGGPEVILRPPVVHVDPDILQ | | |
| | | AEEKIEVETRSL | | |
| UBP21_HUMAN | 61 | MPQASEHRLGRTREPPVNIQPR | 172 | LGSGHVGLRNLGNTCFLNAV |
| Ubiquitin | | VGSKLPFAPRARSKERRNPASG | | LQCLSSTRPLRDFCLRRDFR |
| carboxyl- | | PNPMLRPLPPRPGLPDERLKKL | | QEVPGGGRAQELTEAFADVI |
| terminal | | ELGRGRTSGPRPRGPLRADHGV | | GALWHPDSCEAVNPTRFRAV |
| hydrolase | | PLPGSPPPTVALPLPSRTNLAR | | FQKYVPSFSGYSQQDAQEFL |
| 21 | | SKSVSSGDLRPMGIALGGHRGT | | KLLMERLHLEINRRGRRAPP |
| | | GELGAALSRLALRPEPPTLRRS | | ILANGPVPSPPRRGGALLEE |
| | | TSLRRLGGFPGPPTLFSIRTEP | | PELSDDDRANLMWK |
| | | PASHGSFHMISARSSEPFYSDD | | RYLEREDSKIVDLFVGQLKS |
| | | KMAHHTLLLGSGHVGLRNLGNT | | CLKCQACGYRSTTFEVFCDL |
| | | CFLNAVLQCLSSTRPLRDFCLR | | SLPIPKKGFAGGKVSLRDCF |
| | | RDFRQEVPGGGRAQELTEAFAD | | NLFTKEEELESENAPVCDRC |
| | | VIGALWHPDSCEAVNPTRFRAV | | RQKTRSTKKLTVQRFPRILV |
| | | FQKYVPSFSGYSQQ | | LHLNRFSASRGSIKKSSVGV |
| | | DAQEFLKLLMERLHLEINRRGR | | DFPLQRLSLGDFASDKAGSP |
| | | RAPPILANGPVPSPPRRGGALL | | VYQLYALCNHSGSVHYGHYT |
| | | EEPELSDDDRANLMWKRYLERE | | ALCRCQTGWHVYNDSRVSPV |
| | | DSKIVDLFVGQLKSCLKCQACG | | SENQVASSEGYVLFYQLMQ |
| | | YRSTTFEVFCDLSLPIPKKGFA | | |
| | | GGKVSLRDCENLFTKEEELESE | | |
| | | NAPVCDRCRQKTRSTKKLTVQR | | |
| | | FPRILVLHLNRFSASRGSIKKS | | |
| | | SVGVDFPLQRLSLGDFASDKAG | | |
| | | SPVYQLYALCNHSGSVHYGHYT | | |
| | | ALCRCQTGWHVYNDSRVSPVSE | | |
| | | NQVASSEGYVLFYQLMQEPPRC | | |
| | | L | | |
| U17L4_HUMAN | 62 | MGDDSLYLGGEWQENHFSKLTS | 173 | AVGAGLQNMGNTCYENASLQ |
| Inactive | | SRPDAAFAEIQRTSLPEKSPLS | | CLTYTLPLANYMLSREHSQT |
| ubiquitin | | SETRVDLCDDLAPVARQLAPRE | | CQRPKCCMLCTMQAHITWAL |
| carboxyl- | | KLPLSSRRPAAVGAGLQNMGNT | | HSPGHVIQPSQALAAGFHRG |
| terminal | | CYENASLQCLTYTLPLANYMLS | | KQEDVHEFLMFTVDAMKKAC |
| hydrolase | | REHSQTCQRPKCCMLCTMQAHI | | LPGHKQVDHHSKDTTLIHQI |
| 17-like | | TWALHSPGHVIQPSQALAAGFH | | FGGCWRSQIKCLHCHGISDT |
| protein 4 | | RGKQEDVHEFLMFTVDAMKKAC | | FDPYLDIALDIQAAQSVKQA |
| | | LPGHKQVDHHSKDTTLIHQIFG | | LEQLVKPEELNGENAYHCGL |
| | | GCWRSQIKCLHCHGISDTFDPY | | CLQRAPASNTLTLHTSAKVL |
| | | LDIALDIQAAQSVKQALEQLVK | | ILVLKRFSDVAGNKLAKNVQ |
| | | PEELNGENAYHCGLCLQRAPAS | | YPECLDMQPYMSQQNTGPLV |
| | | NTLTLHTSAKVLILVLKRFSDV | | YVLYAVLVHAGWSCHDGYYF |
| | | AGNKLAKNVQYPEC | | SYVKAQEGQWYKMDDAEVTV |
| | | LDMQPYMSQQNTGPLVYVLYAV | | CSITSVLSQQAYVLFYIQKS |
| | | LVHAGWSCHDGYYFSYVKAQEG | | |
| | | QWYKMDDAEVTVCSITSVLSQQ | | |
| | | AYVLFYIQKSEWERHSESVSRG | | |
| | | REPRALGAEDTDRPATQGELKR | | |
| | | DHPCLQVPELDEHLVERATEES | | |
| | | TLDHWKFPQEQNKMKPEFNVRK | | |
| | | VEGTLPPNVLVIHQSKYKCGMK | | |
| | | NHHPEQQSSLLNLSSMNSTDQE | | |
| | | SMNTGTLASLQGRTRRSKGKNK | | |
| | | HSKRSLLVCQ | | |
| U17LK_HUMAN | 63 | MEDDSLYLGGEWQFNHESKLTS | 174 | AVGAGLQNMGNTCYVNASLQ |
| Ubiquitin | | SRPDAAFAEIQRTSLPEKSPLS | | CLTYTPPLANYMLSREHSQT |
| carboxyl- | | CETRVDLCDDLAPVARQLAPRE | | CHRHKGCMLCTMQAHITRAL |
| terminal | | KLPLSSRRPAAVGAGLQNMGNT | | HNPGHVIQPSQALAAGFHRG |
| hydrolase | | CYVNASLQCLTYTPPLANYMLS | | KQEDAHEFLMFTVDAMKKAC |
| 17-like | | REHSQTCHRHKGCMLCTMQAHI | | LPGHKQVDHHSKDTTLIHQI |
| protein 20 | | TRALHNPGHVIQPSQALAAGFH | | FGGYWRSQIKCLHCHGISDT |
| | | RGKQEDAHEFLMFTVDAMKKAC | | FDPYLDIALDIQAAQSVQQA |
| | | LPGHKQVDHHSKDTTLIHQIFG | | LEQLVKPEELNGENAYHCGV |
| | | GYWRSQIKCLHCHGISDTFDPY | | CLQRAPASKTLTLHTSAKVL |
| | | LDIALDIQAAQSVQQALEQLVK | | ILVLKRFSDVTGNKIAKNVQ |
| | | PEELNGENAYHCGVCLQRAPAS | | YPECLDMQPYMSQPNTGPLV |
| | | KTLTLHTSAKVLILVLKRFSDV | | YVLYAVLVHAGWSCHNGHYF |
| | | TGNKIAKNVQYPECLDMQPYMS | | SYVKAQEGQWYKMDDAEVTA |
| | | QPNTGPLVYVLYAVLVHAGWSC | | SSITSVLSQQAYVLFYIQKS |
| | | HNGHYFSYVKAQEGQWYKMDDA | | |
| | | EVTASSITSVLSQQAYVLFYIQ | | |
| | | KSEWERHSESVSRGREPRALGA | | |
| | | EDTDRRATQGELKRDHPCLQAP | | |
| | | ELDEHLVERATQESTLDHWKFL | | |
| | | QEQNKTKPEFNVRKVEGTLPPD | | |
| | | VLVIHQSKYKCGMKNHHPEQQS | | |
| | | SLLNLSSTTPTHQESMNTGTLA | | |
| | | SLRGRARRSKGKNKHSKRALLV | | |
| | | CQ | | |
| UBP12_HUMAN | 64 | MEILMTVSKFASICTMGANASA | 175 | EHYFGLVNFGNTCYCNSVLQ |
| Ubiquitin | | LEKEIGPEQFPVNEHYFGLVNF | | ALYFCRPFREKVLAYKSQPR |
| carboxyl- | | GNTCYCNSVLQALYFCRPFREK | | KKESLLTCLADLFHSIATQK |
| terminal | | VLAYKSQPRKKESLLTCLADLF | | KKVGVIPPKKFITRLRKENE |
| hydrolase | | HSIATQKKKVGVIPPKKFITRL | | LFDNYMQQDAHEFLNYLLNT |
| 12 | | RKENELFDNYMQQDAHEFLNYL | | IADILQEERKQEKQNGRLPN |
| | | LNTIADILQEERKQEKQNGRLP | | GNIDNENNNSTPDPTWVHEI |
| | | NGNIDNENNNSTPDPTWVHEIF | | FQGTLTNETRCLTCETISSK |
| | | QGTLTNETRCLTCETISSKDED | | DEDFLDLSVDVEQNTSITHC |
| | | FLDLSVDVEQNTSITHCLRGFS | | LRGFSNTETLCSEYKYYCEE |
| | | NTETLCSEYKYYCEECRSKQEA | | CRSKQEAHKRMKVKKLPMIL |
| | | HKRMKVKKLPMILALHLKRFKY | | ALHLKRFKYMDQLHRYTKLS |
| | | MDQLHRYTKLSYRVVFPLELRL | | YRVVFPLELRLFNTSGDATN |
| | | FNTSGDATNPDRMY | | PDRMYDLVAVVVHCGSGPNR |
| | | DLVAVVVHCGSGPNRGHYIAIV | | GHYIAIVKSHDFWLLFDDDI |
| | | KSHDFWLLFDDDIVEKIDAQAI | | VEKIDAQAIEEFYGLTSDIS |
| | | EEFYGLTSDISKNSESGYILFY | | KNSESGYILFYQSR |
| | | QSRD | | |
| UL17C_HUMAN | 65 | MEEDSLYLGGEWQFNHFSKLTS | 176 | AVGAGLQNMGNTCYVNASLQ |
| Ubiquitin | | SRPDAAFAEIQRTSLPEKSPLS | | CLTYTPPLANYMLSREHSQT |
| carboxyl- | | CETRVDLCDDLAPVARQLAPRE | | CHRHKGCMLCTMQAHITRAL |
| terminal | | KLPLSNRRPAAVGAGLQNMGNT | | HNPGHVIQPSQALAAGFHRG |
| hydrolase | | CYVNASLQCLTYTPPLANYMLS | | KQEDAHEFLMFTVDAMKKAC |
| 17-like | | REHSQTCHRHKGCMLCTMQAHI | | LPGHKQVDHHSKDTTLIHQI |
| protein 12 | | TRALHNPGHVIQPSQALAAGFH | | FGGYWRSQIKCLHCHGISDT |
| | | RGKQEDAHEFLMFTVDAMKKAC | | FDPYLDIALDIQAAQSVQQA |
| | | LPGHKQVDHHSKDTTLIHQIFG | | LEQLVKPEELNGENAYHCGV |
| | | GYWRSQIKCLHCHGISDTFDPY | | CLQRAPASKMLTLLTSAKVL |
| | | LDIALDIQAAQSVQQALEQLVK | | ILVLKRFSDVTGNKIAKNVQ |
| | | PEELNGENAYHCGVCLQRAPAS | | YPECLDMQPYMSQPNTGPLV |
| | | KMLTLLTSAKVLILVLKRFSDV | | YVLYAVLVHAGWSCHNGHYF |
| | | TGNKIAKNVQYPEC | | SYVKAQEGQWYKMDDAEVTA |
| | | LDMQPYMSQPNTGPLVYVLYAV | | SSITSVLSQQAYVLFYIQKS |
| | | LVHAGWSCHNGHYFSYVKAQEG | | |
| | | QWYKMDDAEVTASSITSVLSQQ | | |
| | | AYVLFYIQKSEWERHSESVSRG | | |
| | | REPRALGAEDTDRRATQGELKR | | |
| | | DHPCLQAPELDEHLVERATQES | | |
| | | TLDHWKFLQEQNKTKPEFNVRK | | |
| | | VEGTLPPDVLVIHQSKYKCGMK | | |
| | | NHHPEQQSSLLKLSSTTPTHQE | | |
| | | SMNTGTLASLRGRARRSKGKNK | | |
| | | HSKRALLVCQ | | |
| UBP20_HUMAN | 66 | MGDSRDLCPHLDSIGEVTKEDL | 177 | PRGLTGMKNLGNSCYMNAAL |
| Ubiquitin | | LLKSKGTCQSCGVTGPNLWACL | | QALSNCPPLTQFFLECGGLV |
| carboxyl- | | QVACPYVGCGESFADHSTIHAQ | | RTDKKPALCKSYQKLVSEVW |
| terminal | | AKKHNLTVNLTTFRLWCYACEK | | HKKRPSYVVPTSLSHGIKLV |
| hydrolase | | EVFLEQRLAAPLLGSSSKFSEQ | | NPMFRGYAQQDTQEFLRCLM |
| | | DSPPPSHPLKAVPIAVADEGES | | DQLHEELKEPVVATVALTEA |
| | | ESEDDDLKPRGLTGMKNLGNSC | | RDSDSSDTDEKREGDRSPSE |
| | | YMNAALQALSNCPPLTQFFLEC | | DEFLSCDSSSDRGEGDGQGR |
| | | GGLVRTDKKPALCKSYQKLVSE | | GGGSSQAETELLIPDEAGRA |
| | | VWHKKRPSYVVPTSLSHGIKLV | | ISEKERMKDRKFSWGQQRTN |
| | | NPMFRGYAQQDTQEFLRCLMDQ | | SEQVDEDADVDTAMAALDDQ |
| | | LHEELKEPVVATVALTEARDSD | | PAEAQPPSPRSSSPCRTPEP |
| | | SSDTDEKREGDRSPSEDEFLSC | | DNDAHLRSSSRPCSPVHHHE |
| | | DSSSDRGEGDGQGR | | GHAKLSSSPPRASPVRMAPS |
| | | GGGSSQAETELLIPDEAGRAIS | | YVLKKAQVLSAGSRRRKEQR |
| | | EKERMKDRKFSWGQQRTNSEQV | | YRSVISDIFDGSILSLVQCL |
| | | DEDADVDTAMAALDDQPAEAQP | | TCDRVSTTVETFQDLSLPIP |
| | | PSPRSSSPCRTPEPDNDAHLRS | | GKEDLAKLHSAIYQNVPAKP |
| | | SSRPCSPVHHHEGHAKLSSSPP | | GACGDSYAAQGWLAFIVEYI |
| | | RASPVRMAPSYVLKKAQVLSAG | | RRFVVSCTPSWFWGPVVTLE |
| | | SRRRKEQRYRSVISDIFDGSIL | | DCLAAFFAADELKGDNMYSC |
| | | SLVQCLTCDRVSTTVETFQDLS | | ERCKKLRNGVKYCKVLRLPE |
| | | LPIPGKEDLAKLHSAIYQNVPA | | ILCIHLKRFRHEVMYSFKIN |
| | | KPGACGDSYAAQGWLAFIVEYI | | SHVSFPLEGLDLRPFLAKEC |
| | | RRFVVSCTPSWFWGPVVTLEDC | | TSQITTYDLLSVICHHGTAG |
| | | LAAFFAADELKGDNMYSCERCK | | SGHYIAYCQNVINGQWYEFD |
| | | KLRNGVKYCKVLRLPEILCIHL | | DQYVTEVHETVVQNAEGYVL |
| | | KRFRHEVMYSFKIN | | FYRKSS |
| | | SHVSFPLEGLDLRPFLAKECTS | | |
| | | QITTYDLLSVICHHGTAGSGHY | | |
| | | IAYCQNVINGQWYEFDDQYVTE | | |
| | | VHETVVQNAEGYVLFYRKSSEE | | |
| | | AMRERQQVVSLAAMREPSLLRF | | |
| | | YVSREWLNKFNTFAEPGPITNQ | | |
| | | TFLCSHGGIPPHKYHYIDDLVV | | |
| | | ILPQNVWEHLYNRFGGGPAVNH | | |
| | | LYVCSICQVEIEALAKRRRIEI | | |
| | | DTFIKLNKAFQAEESPGVIYCI | | |
| | | SMQWFREWEAFVKGKDNEPPGP | | |
| | | IDNSRIAQVKGSGHVQLKQGAD | | |
| | | YGQISEETWTYLNSLYGGGPEI | | |
| | | AIRQSVAQPLGPENLHGEQKIE | | |
| | | AETRAV | | |
| UBP46_HUMAN | 67 | MTVRNIASICNMGTNASALEKD | 178 | EHYFGLVNFGNTCYCNSVLQ |
| Ubiquitin | | IGPEQFPINEHYFGLVNFGNTC | | ALYFCRPFRENVLAYKAQQK |
| carboxyl- | | YCNSVLQALYFCRPFRENVLAY | | KKENLLTCLADLFHSIATQK |
| terminal | | KAQQKKKENLLTCLADLFHSIA | | KKVGVIPPKKFISRLRKEND |
| hydrolase | | TQKKKVGVIPPKKFISRLRKEN | | LFDNYMQQDAHEFLNYLLNT |
| 46 | | DLFDNYMQQDAHEFLNYLLNTI | | IADILQEEKKQEKQNGKLKN |
| | | ADILQEEKKQEKQNGKLKNGNM | | GNMNEPAENNKPELTWVHEI |
| | | NEPAENNKPELTWVHEIFQGTL | | FQGTLTNETRCLNCETVSSK |
| | | TNETRCLNCETVSSKDEDFLDL | | DEDFLDLSVDVEQNTSITHC |
| | | SVDVEQNTSITHCLRDESNTET | | LRDFSNTETLCSEQKYYCET |
| | | LCSEQKYYCETCCSKQEAQKRM | | CCSKQEAQKRMRVKKLPMIL |
| | | RVKKLPMILALHLKRFKYMEQL | | ALHLKRFKYMEQLHRYTKLS |
| | | HRYTKLSYRVVFPLELRLFNTS | | YRVVFPLELRLFNTSSDAVN |
| | | SDAVNLDRMYDLVA | | LDRMYDLVAVVVHCGSGPNR |
| | | VVVHCGSGPNRGHYITIVKSHG | | GHYITIVKSHGFWLLFDDDI |
| | | FWLLFDDDIVEKIDAQAIEEFY | | VEKIDAQAIEEFYGLTSDIS |
| | | GLTSDISKNSESGYILFYQSRE | | KNSESGYILFYQSR |
| CYLD_HUMAN | 68 | MSSGLWSQEKVTSPYWEERIFY | 179 | GKKKGIQGHYNSCYLDSTLF |
| Ubiquitin | | LLLQECSVTDKQTQKLLKVPKG | | CLFAFSSVLDTVLLRPKEKN |
| carboxyl- | | SIGQYIQDRSVGHSRIPSAKGK | | DVEYYSETQELLRTEIVNPL |
| terminal | | KNQIGLKILEQPHAVLFVDEKD | | RIYGYVCATKIMKLRKILEK |
| hydrolase | | VVEINEKFTELLLAITNCEERF | | VEAASGFTSEEKDPEEFLNI |
| CYLD | | SLFKNRNRLSKGLQIDVGCPVK | | LFHHILRVEPLLKIRSAGQK |
| | | VQLRSGEEKFPGVVRFRGPLLA | | VQDCYFYQIFME |
| | | ERTVSGIFFGVELLEEGRGQGF | | KNEKVGVPTIQQLLEWSFIN |
| | | TDGVYQGKQLFQCDEDCGVFVA | | SNLKFAEAPSCLIIQMPRFG |
| | | LDKLELIEDDDTALESDYAGPG | | KDFKLEKKIFPSLELNITDL |
| | | DTMQVELPPLEINSRVSLKVGE | | LEDTPRQCRICGGLAMYECR |
| | | TIESGTVIFCDVLPGKESLGYF | | ECYDDPDISAGKIKQFCKTC |
| | | VGVDMDNPIGNWDGRFDGVQLC | | NTQVHLHPKRLNHKYNPVSL |
| | | SFACVESTILLHIN | | PKDLPDWDWRHGCIPCQNME |
| | | DIIPALSESVTQERRPPKLAFM | | LFAVLCIETSHYVAFVKYGK |
| | | SRGVGDKGSSSHNKPKATGSTS | | DDSAWLFFDSMADRDGGQNG |
| | | DPGNRNRSELFYTLNGSSVDSQ | | FNIPQVTPCPEVGEYLKMSL |
| | | PQSKSKNTWYIDEVAEDPAKSL | | EDLHSLDSRRIQGCARRLLC |
| | | TEISTDEDRSSPPLQPPPVNSL | | DAYMCMYQSPT |
| | | TTENRFHSLPFSLTKMPNINGS | | |
| | | IGHSPLSLSAQSVMEELNTAPV | | |
| | | QESPPLAMPPGNSHGLEVGSLA | | |
| | | EVKENPPFYGVIRWIGQPPGLN | | |
| | | EVLAGLELEDECAGCTDGTFRG | | |
| | | TRYFTCALKKALFVKLKSCRPD | | |
| | | SRFASLQPVSNQIERCNSLAFG | | |
| | | GYLSEVVEENTPPKMEKEGLEI | | |
| | | MIGKKKGIQGHYNS | | |
| | | CYLDSTLFCLFAFSSVLDTVLL | | |
| | | RPKEKNDVEYYSETQELLRTEI | | |
| | | VNPLRIYGYVCATKIMKLRKIL | | |
| | | EKVEAASGFTSEEKDPEEFLNI | | |
| | | LFHHILRVEPLLKIRSAGQKVQ | | |
| | | DCYFYQIFMEKNEKVGVPTIQQ | | |
| | | LLEWSFINSNLKFAEAPSCLII | | |
| | | QMPRFGKDFKLFKKIFPSLELN | | |
| | | ITDLLEDTPRQCRICGGLAMYE | | |
| | | CRECYDDPDISAGKIKQFCKTC | | |
| | | NTQVHLHPKRLNHKYNPVSLPK | | |
| | | DLPDWDWRHGCIPCQNMELFAV | | |
| | | LCIETSHYVAFVKYGKDDSAWL | | |
| | | FFDSMADRDGGQNGFNIPQVTP | | |
| | | CPEVGEYLKMSLEDLHSLDSRR | | |
| | | IQGCARRLLCDAYMCMYQSPTM | | |
| | | SLYK | | |
| UBP16_HUMAN | 69 | MGKKRTKGKTVPIDDSSETLEP | 180 | ITVKGLSNLGNTCFFNAVMQ |
| Ubiquitin | | VCRHIRKGLEQGNLKKALVNVE | | NLSQTPVLRELLKEVKMSGT |
| carboxyl- | | WNICQDCKTDNKVKDKAEEETE | | IVKIEPPDLALTEPLEINLE |
| terminal | | EKPSVWLCLKCGHQGCGRNSQE | | PPGPLTLAMSQFLNEMQETK |
| hydrolase | | QHALKHYLTPRSEPHCLVLSLD | | KGVVTPKELFSQVCKKAVRF |
| 16 | | NWSVWCYVCDNEVQYCSSNQLG | | KGYQQQDSQELLRYLLDGMR |
| | | QVVDYVRKQASITTPKPAEKDN | | AEEHQRVSKGILKAFGNSTE |
| | | GNIELENKKLEKESKNEQEREK | | KLDEELKNKVKDYEKKKSMP |
| | | KENMAKENPPMNSPCQITVKGL | | SFVDRIFGGELTSMIMCDQC |
| | | SNLGNTCFFNAVMQNLSQTPVL | | RTVSLVHESFLDLSLPVLDD |
| | | RELLKEVKMSGTIVKIEPPDLA | | QSGKKSVNDKNLKKTVEDED |
| | | LTEPLEINLEPPGPLTLAMSQF | | QDSEEEKDNDSYIKERSDIP |
| | | LNEMQETKKGVVTPKELFSQVC | | SGTSKHLQKKAKKQAKKQAK |
| | | KKAVRFKGYQQQDS | | NQRRQQKIQGKVLHLNDICT |
| | | QELLRYLLDGMRAEEHQRVSKG | | IDHPEDSEYEAEMSLQGEVN |
| | | ILKAFGNSTEKLDEELKNKVKD | | IKSNHISQEGVMHKEYCVNQ |
| | | YEKKKSMPSFVDRIFGGELTSM | | KDLNGQAKMIESVTDNQKST |
| | | IMCDQCRTVSLVHESELDLSLP | | EEVDMKNINMDNDLEVLTSS |
| | | VLDDQSGKKSVNDKNLKKTVED | | PTRNLNGAYLTEGSNGEVDI |
| | | EDQDSEEEKDNDSYIKERSDIP | | SNGFKNLNLNAALHPDEINI |
| | | SGTSKHLQKKAKKQAKKQAKNQ | | EILNDSHTPGTKVYEVVNED |
| | | RRQQKIQGKVLHLNDICTIDHP | | PETAFCTLANRFVENTDECS |
| | | EDSEYEAEMSLQGEVNIKSNHI | | IQHCLYQFTRNEKLRDANKL |
| | | SQEGVMHKEYCVNQKDLNGQAK | | LCEVCTRRQCNGPKANIKGE |
| | | MIESVTDNQKSTEEVDMKNINM | | RKHVYTNAKKQMLISLAPPV |
| | | DNDLEVLTSSPTRNLNGAYLTE | | LTLHLKRFQQAGFNLRKVNK |
| | | GSNGEVDISNGFKNLNLNAALH | | HIKFPEIL |
| | | PDEINIEILNDSHT | | DLAPFCTLKCKNVAEENTRV |
| | | PGTKVYEVVNEDPETAFCTLAN | | LYSLYGVVEHSGTMRSGHYT |
| | | REVFNTDECSIQHCLYQFTRNE | | AYAKARTANSHLSNLVLHGD |
| | | KLRDANKLLCEVCTRRQCNGPK | | IPQDFEMESKGQWFHISDTH |
| | | ANIKGERKHVYTNAKKQMLISL | | VQAVPTTKVLNSQAYLLFYE |
| | | APPVLTLHLKRFQQAGFNLRKV | | RIL |
| | | NKHIKFPEILDLAPFCTLKCKN | | |
| | | VAEENTRVLYSLYGVVEHSGTM | | |
| | | RSGHYTAYAKARTANSHLSNLV | | |
| | | LHGDIPQDFEMESKGQWFHISD | | |
| | | THVQAVPTTKVLNSQAYLLFYE | | |
| | | RIL | | |
| ALG13_HUMAN | 70 | MKCVFVTVGTTSEDDLIACVSA | 181 | YRYKDSLKEDIQKADLVISH |
| Putative | | PDSLQKIESLGYNRLILQIGRG | | AGAGSCLETLEKGKPLVVVI |
| bifunctional | | TVVPEPFSTESFTLDVYRYKDS | | NEKLMNNHQLELAKQLHKEG |
| UDP-N- | | LKEDIQKADLVISHAGAGSCLE | | HLFYCTCRVLTCPGQAKSIA |
| acetylgluco- | | TLEKGKPLVVVINEKLMNNHQL | | SAPGKCQDSAALTSTAFSGL |
| samine | | ELAKQLHKEGHLFYCTCRVLTC | | DFGLLSGYLHKQALVTATHP |
| transferase | | PGQAKSIASAPGKCQDSAALTS | | TCTLLFPSCHAFFPLPLTPT |
| and | | TAFSGLDFGLLSGYLHKQALVT | | LYKMHKGWKNYCSQKSLNEA |
| deubiquitinase | | ATHPTCTLLFPSCHAFFPLPLT | | SMDEYLGSLGLFRKLTAKDA |
| ALG13 | | PTLYKMHKGWKNYCSQKSLNEA | | SCLFRAISEQLFCSQVHHLE |
| | | SMDEYLGSLGLFRKLTAKDASC | | IRKACVSYMRENQQTFESYV |
| | | LFRAISEQLFCSQVHHLEIRKA | | EGSFEKYLERLGDPKESAGQ |
| | | CVSYMRENQQTFESYVEGSFEK | | LEIRALSLIYNRDFILYREP |
| | | YLERLGDPKESAGQ | | GKPPTYVTDNGYEDKILLCY |
| | | LEIRALSLIYNRDFILYRFPGK | | SSSGHYDSVYS |
| | | PPTYVTDNGYEDKILLCYSSSG | | |
| | | HYDSVYSKQFQSSAAVCQAVLY | | |
| | | EILYKDVFVVDEEELKTAIKLF | | |
| | | RSGSKKNRNNAVTGSEDAHTDY | | |
| | | KSSNQNRMEEWGACYNAENIPE | | |
| | | GYNKGTEETKSPENPSKMPFPY | | |
| | | KVLKALDPEIYRNVEFDVWLDS | | |
| | | RKELQKSDYMEYAGRQYYLGDK | | |
| | | CQVCLESEGRYYNAHIQEVGNE | | |
| | | NNSVTVFIEELAEKHVVPLANL | | |
| | | KPVTQVMSVPAWNAMPSRKGRG | | |
| | | YQKMPGGYVPEIVISEMDIKQQ | | |
| | | KKMFKKIRGKEVYM | | |
| | | TMAYGKGDPLLPPRLQHSMHYG | | |
| | | HDPPMHYSQTAGNVMSNEHFHP | | |
| | | QHPSPRQGRGYGMPRNSSRFIN | | |
| | | RHNMPGPKVDFYPGPGKRCCQS | | |
| | | YDNFSYRSRSFRRSHRQMSCVN | | |
| | | KESQYGFTPGNGQMPRGLEETI | | |
| | | TFYEVEEGDETAYPTLPNHGGP | | |
| | | STMVPATSGYCVGRRGHSSGKQ | | |
| | | TLNLEEGNGQSENGRYHEEYLY | | |
| | | RAEPDYETSGVYSTTASTANLS | | |
| | | LQDRKSCSMSPQDTVTSYNYPQ | | |
| | | KMMGNIAAVAASCANNVPAPVL | | |
| | | SNGAAANQAISTTSVSSQNAIQ | | |
| | | PLFVSPPTHGRPVI | | |
| | | ASPSYPCHSAIPHAGASLPPPP | | |
| | | PPPPPPPPPPPPPPPPPPPPPP | | |
| | | PALDVGETSNLQPPPPLPPPPY | | |
| | | SCDPSGSDLPQDTKVLQYYENL | | |
| | | GLQCYYHSYWHSMVYVPQMQQQ | | |
| | | LHVENYPVYTEPPLVDQTVPQC | | |
| | | YSEVRREDGIQAEASANDTFPN | | |
| | | ADSSSVPHGAVYYPVMSDPYGQ | | |
| | | PPLPGFDSCLPVVPDYSCVPPW | | |
| | | HPVGTAYGGSSQIHGAINPGPI | | |
| | | GCIAPSPPASHYVPQGM | | |
| OTU1_HUMAN | 71 | MFGPAKGRHFGVHPAPGFPGGV | 182 | QGLSSRTRVRELQGQIAAIT |
| Ubiquitin | | SQQAAGTKAGPAGAWPVGSRTD | | GIAPGGQRILVGYPPECLDL |
| thioesterase | | TMWRLRCKAKDGTHVLQGLSSR | | SNGDTILEDLPIQSGDMLII |
| OTU1 | | TRVRELQGQIAAITGIAPGGQR | | EEDQTRPRSSPAFTKRGASS |
| | | ILVGYPPECLDLSNGDTILEDL | | YVRETLPVLTRTVVPADNSC |
| | | PIQSGDMLIIEEDQTRPRSSPA | | LFTSVYYVVEGGVLNPACAP |
| | | FTKRGASSYVRETLPVLTRTVV | | EMRRLIAQIVASDPDFYSEA |
| | | PADNSCLFTSVYYVVEGGVLNP | | ILGKTNQEYCDWIKRDDTWG |
| | | ACAPEMRRLIAQIVASDPDFYS | | GAIEISILSKFYQCEICVVD |
| | | EAILGKTNQEYCDWIKRDDTWG | | TQTVRIDRFGEDAGYTKRVL |
| | | GAIEISILSKFYQCEICVVDTQ | | LIYDGIHYDPLQ |
| | | TVRIDRFGEDAGYTKRVLLIYD | | |
| | | GIHYDPLQRNFPDPDTPPLTIF | | |
| | | SSNDDIVLVQALELADEARRRR | | |
| | | QFTDVNRFTLRCMVCQKGLTGQ | | |
| | | AEAREHAKETGHTNFGEV | | |
| OTUD1_HUMAN | 72 | MQLYSSVCTHYPAGAPGPTAAA | 183 | HREAAAVPAAKMPAFSSCFE |
| OTU | | PAPPAAATPFKVSLQPPGAAGA | | VVSGAAAPASAAAGPPGASC |
| domain- | | APEPETGECQPAAAAEHREAAA | | KPPLPPHYTSTAQITVRALG |
| containing | | VPAAKMPAFSSCFEVVSGAAAP | | ADRLLLHGPDPVPGAAGSAA |
| protein 1 | | ASAAAGPPGASCKPPLPPHYTS | | APRGRCLLLAPAPAAPVPPR |
| | | TAQITVRALGADRLLLHGPDPV | | RGSSAWLLEELLRPDCPEPA |
| | | PGAAGSAAAPRGRCLLLAPAPA | | GLDATREGPDRNRRLSEHRQ |
| | | APVPPRRGSSAWLLEELLRPDC | | ALAAAKHRGPAATPGSPDPG |
| | | PEPAGLDATREGPDRNFRLSEH | | PGPWGEEHLAERGPRGWERG |
| | | RQALAAAKHRGPAATPGSPDPG | | GDRCDAPGGDAARRPDPEAE |
| | | PGPWGEEHLAERGPRGWERGGD | | APPAGSIEAAPSSAAEPVIV |
| | | RCDAPGGDAARRPDPEAEAPPA | | SRSDPRDEKLALYLAEVEKQ |
| | | GSIEAAPSSAAEPVIVSRSDPR | | DKYLRQRNKYRFHIIPDGNC |
| | | DEKLALYLAEVEKQ | | LYRAVSKTVYGDQSLHRELR |
| | | DKYLRQRNKYRFHIIPDGNCLY | | EQTVHYIADHLDHFSPLIEG |
| | | RAVSKTVYGDQSLHRELREQTV | | DVGEFIIAAAQDGAWAGYPE |
| | | HYIADHLDHFSPLIEGDVGEFI | | LLAMGQMLNVNIHLTTGGRL |
| | | IAAAQDGAWAGYPELLAMGQML | | ESPTVSTMIHYLGPEDSLRP |
| | | NVNIHLTTGGRLESPTVSTMIH | | SIWLSWLSNGHYDAV |
| | | YLGPEDSLRPSIWLSWLSNGHY | | |
| | | DAVFDHSYPNPEYDNWCKQTQV | | |
| | | QRKRDEELAKSMAISLSKMYIE | | |
| | | QNACS | | |
| OTU6B_HUMAN | 73 | MEAVLTEELDEEEQLLRRHRKE | 184 | QKHREELEQLKLTTKENKID |
| Deubiquitinase | | KKELQAKIQGMKNAVPKNDKKR | | SVAVNISNLVLENQPPRISK |
| OTUD6B | | RKQLTEDVAKLEKEMEQKHREE | | AQKRREKKAALEKEREERIA |
| | | LEQLKLTTKENKIDSVAVNISN | | EAEIENLTGARHMESEKLAQ |
| | | LVLENQPPRISKAQKRREKKAA | | ILAARQLEIKQIPSDGHCMY |
| | | LEKEREERIAEAEIENLTGARH | | KAIEDQLKEKDCALTVVALR |
| | | MESEKLAQILAARQLEIKQIPS | | SQTAEYMQSHVEDFLPFLTN |
| | | DGHCMYKAIEDQLKEKDCALTV | | PNTGDMYTPEEFQKYCEDIV |
| | | VALRSQTAEYMQSHVEDFLPFL | | NTAAWGGQLELRALSHILQT |
| | | TNPNTGDMYTPEEFQKYCEDIV | | PIEIIQADSPPIIVGEEYSK |
| | | NTAAWGGQLELRALSHILQTPI | | KPLILVYMRHAYG |
| | | EIIQADSPPIIVGEEYSKKPLI | | |
| | | LVYMRHAYGLGEHYNSVTRLVN | | |
| | | IVTENCS | | |
| OTU6A_HUMAN | 74 | MDDPKSEQQRILRRHQRERQEL | 185 | QELEKFQDDSSIESVVEDLA |
| OTU | | QAQIRSLKNSVPKTDKTKRKQL | | KMNLENRPPRSSKAHRKRER |
| domain- | | LQDVARMEAEMAQKHRQELEKF | | MESEERERQESIFQAEMSEH |
| containing | | QDDSSIESVVEDLAKMNLENRP | | LAGFKREEEEKLAAILGARG |
| protein 6A | | PRSSKAHRKRERMESEERERQE | | LEMKAIPADGHCMYRAIQDQ |
| | | SIFQAEMSEHLAGFKREEEEKL | | LVFSVSVEMLRCRTASYMKK |
| | | AAILGARGLEMKAIPADGHCMY | | HVDEFLPFFSNPETSDSFGY |
| | | RAIQDQLVFSVSVEMLRCRTAS | | DDFMIYCDNIVRTTAWGGQL |
| | | YMKKHVDEFLPFFSNPETSDSF | | ELRALSHVLKTPIEVIQADS |
| | | GYDDFMIYCDNIVRTTAWGGQL | | PTLIIGEEYVKKPIILVYLR |
| | | ELRALSHVLKTPIEVIQADSPT | | YAYS |
| | | LIIGEEYVKKPIILVYLRYAYS | | |
| | | LGEHYNSVTPLEAGAAGGVLPR | | |
| | | LL | | |
| OTUB1_HUMAN | 75 | MAAEEPQQQKQEPLGSDSEGVN | 75 | MAAEEPQQQKQEPLGSDSEG |
| Ubiquitin | | CLAYDEAIMAQQDRIQQEIAVQ | | VNCLAYDEAIMAQQDRIQQE |
| thioesterase | | NPLVSERLELSVLYKEYAEDDN | | IAVQNPLVSERLELSVLYKE |
| OTUB1 | | IYQQKIKDLHKKYSYIRKTRPD | | YAEDDNIYQQKIKDLHKKYS |
| | | GNCFYRAFGFSHLEALLDDSKE | | YIRKTRPDGNCFYRAFGFSH |
| | | LQRFKAVSAKSKEDLVSQGFTE | | LEALLDDSKELQRFKAVSAK |
| | | FTIEDFHNTFMDLIEQVEKQTS | | SKEDLVSQGFTEFTIEDFHN |
| | | VADLLASFNDQSTSDYLVVYLR | | TFMDLIEQVEKQTSVADLLA |
| | | LLTSGYLQRESKFFEHFIEGGR | | SENDQSTSDYLVVYLRLLTS |
| | | TVKEFCQQEVEPMCKESDHIHI | | GYLQRESKFFEHFIEGGRTV |
| | | IALAQALSVSIQVEYMDRGEGG | | KEFCQQEVEPMCKESDHIHI |
| | | TTNPHIFPEGSEPKVYLLYRPG | | IALAQALSVSIQVEYMDRGE |
| | | HYDILYK | | GGTTNPHIFPEGSEPKVYLL |
| | | | | YRPGHYDILYK |
| OTU7A_HUMAN | 76 | MVSSVLPNPTSAECWAALLHDP | 186 | SDYEQLRQVHTANLPHVFNE |
| OTU | | MTLDMDAVLSDFVRSTGAEPGL | | GRGPKQPEREPQPGHKVERP |
| domain- | | ARDLLEGKNWDLTAALSDYEQL | | CLQRQDDIAQEKRLSRGISH |
| containing | | RQVHTANLPHVENEGRGPKQPE | | ASSAIVSLARSHVASECNNE |
| protein 7A | | REPQPGHKVERPCLQRQDDIAQ | | QFPLEMPIYTFQLPDLSVYS |
| | | EKRLSRGISHASSAIVSLARSH | | EDERSFIERDLIEQATMVAL |
| | | VASECNNEQFPLEMPIYTFQLP | | EQAGRLNWWSTVCTSCKRLL |
| | | DLSVYSEDFRSFIERDLIEQAT | | PLATTGDGNCLLHAASLGMW |
| | | MVALEQAGRLNWWSTVCTSCKR | | GFHDRDLVLRKALYTMMRTG |
| | | LLPLATTGDGNCLLHAASLGMW | | AEREALKRRWRWQQTQQNKE |
| | | GFHDRDLVLRKALYTMMRTGAE | | EEWEREWTELLKLASSEPRT |
| | | REALKRRWRWQQTQQNKEEEWE | | HFSKNGGTGGGVDNSEDPVY |
| | | REWTELLKLASSEPRTHFSKNG | | ESLEEFHVFVLAHILRRPIV |
| | | GTGGGVDNSEDPVY | | VVADTMLRDSGGEAFAPIPF |
| | | ESLEEFHVFVLAHILRRPIVVV | | GGIYLPLEVPPNRCHCSPLV |
| | | ADTMLRDSGGEAFAPIPFGGIY | | LAYDQAHFSAL |
| | | LPLEVPPNRCHCSPLVLAYDQA | | |
| | | HFSALVSMEQRDQQREQAVIPL | | |
| | | TDSEHKLLPLHFAVDPGKDWEW | | |
| | | GKDDNDNARLAHLILSLEAKLN | | |
| | | LLHSYMNVTWIRIPSETRAPLA | | |
| | | QPESPTASAGEDVQSLADSLDS | | |
| | | DRDSVCSNSNSNNGKNGKDKEK | | |
| | | EKQRKEKDKTRADSVANKLGSF | | |
| | | SKTLGIKLKKNMGGLGGLVHGK | | |
| | | MGRANSANGKNGDSAERGKEKK | | |
| | | AKSRKGSKEESGASASTSPSEK | | |
| | | TTPSPTDKAAGASP | | |
| | | AEKGGGPRGDAWKYSTDVKLSL | | |
| | | NILRAAMQGERKFIFAGLLLTS | | |
| | | HRHQFHEEMIGYYLTSAQERFS | | |
| | | AEQEQRRRDAATAAAAAAAAAA | | |
| | | ATAKRPPRRPETEGVPVPERAS | | |
| | | PGPPTQLVLKLKERPSPGPAAG | | |
| | | RAARAAAGGTASPGGGARRASA | | |
| | | SGPVPGRSPPAPARQSVIHVQA | | |
| | | SGARDEACAPAVGALRPCATYP | | |
| | | QQNRSLSSQSYSPARAAALRTV | | |
| | | NTVESLARAVPGALPGAAGTAG | | |
| | | AAEHKSQTYTNGFGALRDGLEF | | |
| | | ADADAPTARSNGECGRGGPGPV | | |
| | | QRRCQRENCAFYGRAETEHYCS | | |
| | | YCYREELRRRREARGARP | | |
| OTUD4_HUMAN | 77 | MEAAVGVPDGGDQGGAGPREDA | 187 | MEAAVGVPDGGDQGGAGPRE |
| OTU | | TPMDAYLRKLGLYRKLVAKDGS | | DATPMDAYLRKLGLYRKLVA |
| domain- | | CLFRAVAEQVLHSQSRHVEVRM | | KDGSCLFRAVAEQVLHSQSR |
| containing | | ACIHYLRENREKFEAFIEGSFE | | HVEVRMACIHYLRENREKFE |
| protein 4 | | EYLKRLENPQEWVGQVEISALS | | AFIEGSFEEYLKRLENPQEW |
| | | LMYRKDFIIYREPNVSPSQVTE | | VGQVEISALSLMYRKDFIIY |
| | | NNFPEKVLLCFSNGNHYDIVYP | | REPNVSPSQVTENNFPEKVL |
| | | IKYKESSAMCQSLLYELLYEKV | | LCFSNGNHYDIVYP |
| | | FKTDVSKIVMELDTLEVADEDN | | |
| | | SEISDSEDDSCKSKTAAAAADV | | |
| | | NGFKPLSGNEQLKNNGNSTSLP | | |
| | | LSRKVLKSLNPAVYRNVEYEIW | | |
| | | LKSKQAQQKRDYSIAAGLQYEV | | |
| | | GDKCQVRLDHNGKF | | |
| | | LNADVQGIHSENGPVLVEELGK | | |
| | | KHTSKNLKAPPPESWNTVSGKK | | |
| | | MKKPSTSGQNFHSDVDYRGPKN | | |
| | | PSKPIKAPSALPPRLQHPSGVR | | |
| | | QHAFSSHSSGSQSQKFSSEHKN | | |
| | | LSRTPSQIIRKPDRERVEDFDH | | |
| | | TSRESNYFGLSPEERREKQAIE | | |
| | | ESRLLYEIQNRDEQAFPALSSS | | |
| | | SVNQSASQSSNPCVQRKSSHVG | | |
| | | DRKGSRRRMDTEERKDKDSIHG | | |
| | | HSQLDKRPEPSTLENITDDKYA | | |
| | | TVSSPSKSKKLECPSPAEQKPA | | |
| | | EHVSLSNPAPLLVSPEVHLTPA | | |
| | | VPSLPATVPAWPSE | | |
| | | PTTFGPTGVPAPIPVLSVTQTL | | |
| | | TTGPDSAVSQAHLTPSPVPVSI | | |
| | | QAVNQPLMPLPQTLSLYQDPLY | | |
| | | PGFPCNEKGDRAIVPPYSLCQT | | |
| | | GEDLPKDKNILRFFENLGVKAY | | |
| | | SCPMWAPHSYLYPLHQAYLAAC | | |
| | | RMYPKVPVPVYPHNPWFQEAPA | | |
| | | AQNESDCTCTDAHFPMQTEASV | | |
| | | NGQMPQPEIGPPTFSSPLVIPP | | |
| | | SQVSESHGQLSYQADLESETPG | | |
| | | QLLHADYEESLSGKNMFPQSFG | | |
| | | PNPFLGPVPIAPPFFPHVWYGY | | |
| | | PFQGFIENPVMRQNIVLPSDEK | | |
| | | GELDLSLENLDLS | | |
| | | KDCGSVSTVDEFPEARGEHVHS | | |
| | | LPEASVSSKPDEGRTEQSSQTR | | |
| | | KADTALASIPPVAEGKAHPPTQ | | |
| | | ILNRERETVPVELEPKRTIQSL | | |
| | | KEKTEKVKDPKTAADVVSPGAN | | |
| | | SVDSRVQRPKEESSEDENEVSN | | |
| | | ILRSGRSKQFYNQTYGSRKYKS | | |
| | | DWGYSGRGGYQHVRSEESWKGQ | | |
| | | PSRSRDEGYQYHRNVRGRPFRG | | |
| | | DRRRSGMGDGHRGQHT | | |
| OTUB2_HUMAN | 78 | MSETSFNLISEKCDILSILRDH | 78 | MSETSFNLISEKCDILSILR |
| Ubiquitin | | PENRIYRRKIEELSKRFTAIRK | | DHPENRIYRRKIEELSKRFT |
| thioesterase | | TKGDGNCFYRALGYSYLESLLG | | AIRKTKGDGNCFYRALGYSY |
| OTUB2 | | KSREIFKFKERVLQTPNDLLAA | | LESLLGKSREIFKFKERVLQ |
| | | GFEEHKERNFFNAFYSVVELVE | | TPNDLLAAGFEEHKERNFFN |
| | | KDGSVSSLLKVFNDQSASDHIV | | AFYSVVELVEKDGSVSSLLK |
| | | QFLRLLTSAFIRNRADFFRHFI | | VENDQSASDHIVQFLRLLTS |
| | | DEEMDIKDFCTHEVEPMATECD | | AFIRNRADFFRHFIDEEMDI |
| | | HIQITALSQALSIALQVEYVDE | | KDFCTHEVEPMATECDHIQI |
| | | MDTALNHHVFPEAATPSVYLLY | | TALSQALSIALQVEYVDEMD |
| | | KTSHYNILYAADKH | | TALNHHVFPEAATPSVYLLY |
| | | | | KTSHYNILYAADKH |
| OTUD3_HUMAN | 79 | MSRKQAAKSRPGSGSRKAEAER | 188 | MSRKQAAKSRPGSGSRKAEA |
| OTU | | KRDERAARRALAKERRNRPESG | | ERKRDERAARRALAKERRNR |
| domain- | | GGGGCEEEFVSFANQLQALGLK | | PESGGGGGCEEEFVSFANQL |
| containing | | LREVPGDGNCLFRALGDQLEGH | | QALGLKLREVPGDGNCLFRA |
| protein 3 | | SRNHLKHRQETVDYMIKQREDF | | LGDQLEGHSRNHLKHRQETV |
| | | EPFVEDDIPFEKHVASLAKPGT | | DYMIKQREDFEPFVEDDIPF |
| | | FAGNDAIVAFARNHQLNVVIHQ | | EKHVASLAKPGTFAGNDAIV |
| | | LNAPLWQIRGTEKSSVRELHIA | | AFARNHQLNVVIHQLNAPLW |
| | | YRYGEHYDSVRRINDNSEAPAH | | QIRGTEKSSVRELHIAYRYG |
| | | LQTDFQMLHQDESNKREKIKTK | | EHYDSVRR |
| | | GMDSEDDLRDEVEDAVQKVCNA | | |
| | | TGCSDFNLIVQNLEAENYNIES | | |
| | | AIIAVLRMNQGKRNNAEENLEP | | |
| | | SGRVLKQCGPLWEE | | |
| | | GGSGARIFGNQGLNEGRTENNK | | |
| | | AQASPSEENKANKNQLAKVTNK | | |
| | | QRREQQWMEKKKRQEERHRHKA | | |
| | | LESRGSHRDNNRSEAEANTQVT | | |
| | | LVKTFAALNI | | |
| OTU7B_HUMAN | 80 | MTLDMDAVLSDFVRSTGAEPGL | 189 | MTLDMDAVLSDFVRSTGAEP |
| OTU | | ARDLLEGKNWDVNAALSDFEQL | | GLARDLLEGKNWDVNAALSD |
| domain- | | RQVHAGNLPPSFSEGSGGSRTP | | FEQLRQVHAGNLPPSFSEGS |
| containing | | EKGFSDREPTRPPRPILQRQDD | | GGSRTPEKGFSDREPTRPPR |
| protein 7B | | IVQEKRLSRGISHASSSIVSLA | | PILQRQDDIVQEKRLSRGIS |
| (Also referred | | RSHVSSNGGGGGSNEHPLEMPI | | HASSSIVSLARSHVSSNGGG |
| to herein as | | CAFQLPDLTVYNEDERSFIERD | | GGSNEHPLEMPICAFQLPDL |
| Cezanne) | | LIEQSMLVALEQAGRLNWWVSV | | TVYNEDFRSFIERDLIEQSM |
| | | DPTSQRLLPLATTGDGNCLLHA | | LVALEQAGRLNWWVSVDPTS |
| | | ASLGMWGFHDRDLMLRKALYAL | | QRLLPLATTGDGNCLLHAAS |
| | | MEKGVEKEALKRRWRWQQTQQN | | LGMWGFHDRDLMLRKALYAL |
| | | KESGLVYTEDEWQKEWNELIKL | | MEKGVEKEALKRRWRWQQTQ |
| | | ASSEPRMHLGTNGANCGGVESS | | QNKESGLVYTEDEWQKEWNE |
| | | EEPVYESLEEFHVFVLAHVLRR | | LIKLASSEPRMHLGTNGANC |
| | | PIVVVADTMLRDSGGEAFAPIP | | GGVESSEEPVYESLEEFHVF |
| | | FGGIYLPLEVPASQCHRSPLVL | | VLAHVLRRPIVVVADTMLRD |
| | | AYDQAHFSALVSMEQKENTKEQ | | SGGEAFAPIPFGGIYLPLEV |
| | | AVIPLTDSEYKLLPLHFAVDPG | | PASQCHRSPLVLAYDQAHFS |
| | | KGWEWGKDDSDNVRLASVILSL | | AL |
| | | EVKLHLLHSYMNVKWIPLSSDA | 270 | PPSFSEGSGGSRTPEKGFSD |
| | | QAPLAQPESPTASAGDEPRSTP | | REPTRPPRPILQRQDDIVQE |
| | | ESGDSDKESVGSSSTSNEGGRR | | KRLSRGISHASSSIVSLARS |
| | | KEKSKRDREKDKKRADSVANKL | | HVSSNGGGGGSNEHPLEMPI |
| | | GSFGKTLGSKLKKNMGGLMHSK | | CAFQLPDLTVYNEDFRSFIE |
| | | GSKPGGVGTGLGGSSGTETLEK | | RDLIEQSMLVALEQAGRLNW |
| | | KKKNSLKSWKGGKEEAAGDGPV | | WVSVDPTSQRLLPLATTGDG |
| | | SEKPPAESVGNGGSKYSQEVMQ | | NCLLHAASLGMWGFHDRDLM |
| | | SLSILRTAMQGEGKFIFVGTLK | | LRKALYALMEKGVEKEALKR |
| | | MGHRHQYQEEMIQRYLSDAEER | | RWRWQQTQQNKESGLVYTED |
| | | FLAEQKQKEAERKIMNGGIGGG | | EWQKEWNELIKLASSEPRMH |
| | | PPPAKKPEPDAREEQPTGPPAE | | LGTNGANCGGVESSEEPVYE |
| | | SRAMAFSTGYPGDFTIPRPSGG | | SLEEFHVFVLAHVLRRPIVV |
| | | GVHCQEPRRQLAGGPCVGGLPP | | VADTMLRDSGGEAFAPIPFG |
| | | YATFPRQCPPGRPYPHQDSIPS | | GIYLPLEVPASQCHRSPLVL |
| | | LEPGSHSKDGLHRGALLPPPYR | | AYDQAHFSALVSMEQKENTK |
| | | VADSYSNGYREPPEPDGWAGGL | | EQAVIPLTDSEYKLLPLHFA |
| | | RGLPPTQTKCKQPNCSFYGHPE | | VDPGKGWEWGKDDSDNVRLA |
| | | TNNFCSCCYREELRRREREPDG | | SVILSLEVKLHLLHSYMNVK |
| | | ELLVHRF | | WIPLSSDAQAPLAQ |
| OTUD5_HUMAN | 81 | MTILPKKKPPPPDADPANEPPP | 190 | MTILPKKKPPPPDADPANEP |
| OTU | | PGPMPPAPRRGGGVGVGGGGTG | | PPPGPMPPAPRRGGGVGVGG |
| domain- | | VGGGDRDRDSGVVGARPRASPP | | GGTGVGGGDRDRDSGVVGAR |
| containing | | PQGPLPGPPGALHRWALAVPPG | | PRASPPPQGPLPGPPGALHR |
| protein 5 | | AVAGPRPQQASPPPCGGPGGPG | | WALAVPPGAVAGPRPQQASP |
| | | GGPGDALGAAAAGVGAAGVVVG | | PPCGGPGGPGGGPGDALGAA |
| | | VGGAVGVGGCCSGPGHSKRRRQ | | AAGVGAAGVVVGVGGAVGVG |
| | | APGVGAVGGGSPEREEVGAGYN | | GCCSGPGHSKRRRQAPGVGA |
| | | SEDEYEAAAARIEAMDPATVEQ | | VGGGSPEREEVGAGYNSEDE |
| | | QEHWFEKALRDKKGFIIKQMKE | | YEAAAARIEAMDPATVEQQE |
| | | DGACLFRAVADQVYGDQDMHEV | | HWFEKALRDKKGFIIKQMKE |
| | | VRKHCMDYLMKNADYFSNYVTE | | DGACLFRAVADQVYGDQDMH |
| | | DFTTYINRKRKNNCHGNHIEMQ | | EVVRKHCMDYLMKNADYFSN |
| | | AMAEMYNRPVEVYQ | | YVTEDFTTYINRKRKNNCHG |
| | | YSTGTSAVEPINTFHGIHQNED | | NHIEMQAMAEMYNRPVEVYQ |
| | | EPIRVSYHRNIHYNSVVNPNKA | | YSTGTSAVEPINTFHGIHQN |
| | | TIGVGLGLPSFKPGFAEQSLMK | | EDEPIRVSYHRNIHYNSV |
| | | NAIKTSEESWIEQQMLEDKKRA | | |
| | | TDWEATNEAIEEQVARESYLQW | | |
| | | LRDQEKQARQVRGPSQPRKASA | | |
| | | TCSSATAAASSGLEEWTSRSPR | | |
| | | QRSSASSPEHPELHAELGMKPP | | |
| | | SPGTVLALAKPPSPCAPGTSSQ | | |
| | | FSAGADRATSPLVSLYPALECR | | |
| | | ALIQQMSPSAFGLNDWDDDEIL | | |
| | | ASVLAVSQQEYLDSMKKNKVHR | | |
| | | DPPPDKS | | |
| TNAP3_HUMAN | 82 | MAEQVLPQALYLSNMRKAVKIR | 191 | MAEQVLPQALYLSNMRKAVK |
| Tumor | | ERTPEDIFKPTNGIIHHFKTMH | | IRERTPEDIFKPTNGIIHHF |
| necrosis | | RYTLEMFRTCQFCPQFREIIHK | | KTMHRYTLEMFRTCQFCPQF |
| factor | | ALIDRNIQATLESQKKLNWCRE | | REIIHKALIDRNIQATLESQ |
| alpha-induced | | VRKLVALKTNGDGNCLMHATSQ | | KKLNWCREVRKLVALKTNGD |
| protein 3 | | YMWGVQDTDLVLRKALFSTLKE | | GNCLMHATSQYMWGVQDTDL |
| | | TDTRNFKFRWQLESLKSQEFVE | | VLRKALFSTLKETDTRNFKF |
| | | TGLCYDTRNWNDEWDNLIKMAS | | RWQLESLKSQEFVETGLCYD |
| | | TDTPMARSGLQYNSLEEIHIFV | | TRNWNDEWDNLIKMASTDTP |
| | | LCNILRRPIIVISDKMLRSLES | | MARSGLQYNSLEEIHIFVLC |
| | | GSNFAPLKVGGIYLPLHWPAQE | | NILRRPIIVISDKMLRSLES |
| | | CYRYPIVLGYDSHHFVPLVTLK | | GSNFAPLKVGGIYLPLHWPA |
| | | DSGPEIRAVPLVNRDRGRFEDL | | QECYRYPIVLGYDSHHFVPL |
| | | KVHELTDPENEMKE | | |
| | | KLLKEYLMVIEIPVQGWDHGTT | | |
| | | HLINAAKLDEANLPKEINLVDD | | |
| | | YFELVQHEYKKWQENSEQGRRE | | |
| | | GHAQNPMEPSVPQLSLMDVKCE | | |
| | | TPNCPFFMSVNTQPLCHECSER | | |
| | | RQKNQNKLPKLNSKPGPEGLPG | | |
| | | MALGASRGEAYEPLAWNPEEST | | |
| | | GGPHSAPPTAPSPFLFSETTAM | | |
| | | KCRSPGCPFTLNVQHNGFCERC | | |
| | | HNARQLHASHAPDHTRHLDPGK | | |
| | | CQACLQDVTRTFNGICSTCFKR | | |
| | | TTAEASSSLSTSLPPSCHQRSK | | |
| | | SDPSRLVRSPSPHSCHRAGNDA | | |
| | | PAGCLSQAARTPGD | | |
| | | RTGTSKCRKAGCVYFGTPENKG | | |
| | | FCTLCFIEYRENKHFAAASGKV | | |
| | | SPTASRFQNTIPCLGRECGTLG | | |
| | | STMFEGYCQKCFIEAQNQRFHE | | |
| | | AKRTEEQLRSSQRRDVPRTTQS | | |
| | | TSRPKCARASCKNILACRSEEL | | |
| | | CMECQHPNQRMGPGAHRGEPAP | | |
| | | EDPPKQRCRAPACDHFGNAKCN | | |
| | | GYCNECFQFKQMYG | | |
| ZRAN1_HUMAN | 83 | MSERGIKWACEYCTYENWPSAI | 192 | MSERGIKWACEYCTYENWPS |
| Ubiquitin | | KCTMCRAQRPSGTIITEDPFKS | | AIKCTMCRAQRPSGTIITED |
| thioesterase | | GSSDVGRDWDPSSTEGGSSPLI | | PFKSGSSDVGRDWDPSSTEG |
| ZRANB1 | | CPDSSARPRVKSSYSMENANKW | | GSSPLICPDSSARPRVKSSY |
| | | SCHMCTYLNWPRAIRCTQCLSQ | | SMENANKWSCHMCTYLNWPR |
| | | RRTRSPTESPQSSGSGSRPVAF | | AIRCTQCLSQRRTRSPTESP |
| | | SVDPCEEYNDRNKLNTRTQHWT | | QSSGSGSRPVAFSVDPCEEY |
| | | CSVCTYENWAKAKRCVVCDHPR | | NDRNKLNTRTQHWTCSVCTY |
| | | PNNIEAIELAETEEASSIINEQ | | ENWAKAKRCVVCDHPRPNNI |
| | | DRARWRGSCSSGNSQRRSPPAT | | EAIELAETEEASSIINEQDR |
| | | KRDSEVKMDFQRIELAGAVGSK | | ARWRGSCSSGNSQRRSPPAT |
| | | EELEVDFKKLKQIKNRMKKTDW | | KRDSEVKMDFQRIELAGAVG |
| | | LFLNACVGVVEGDLAAIEAYKS | | SKEELEVDFKKLKQIKNRMK |
| | | SGGDIARQLTADEV | | KTDWLFLNACVGVVEGDLAA |
| | | RLLNRPSAFDVGYTLVHLAIRF | | IEAYKSSGGDIARQLTADEV |
| | | QRQDMLAILLTEVSQQAAKCIP | | RLLNRPSAFDVGYTLVHLAI |
| | | AMVCPELTEQIRREIAASLHQR | | RFQRQDMLAILLTEVSQQAA |
| | | KGDFACYFLTDLVTFTLPADIE | | KCIPAMVCPELTEQIRREIA |
| | | DLPPTVQEKLFDEVLDRDVQKE | | ASLHQRKGDFACYFLTDLVT |
| | | LEEESPIINWSLELATRLDSRL | | FTLPADIEDLPPTVQEKLFD |
| | | YALWNRTAGDCLLDSVLQATWG | | EVLDRDVQKELEEESPIINW |
| | | IYDKDSVLRKALHDSLHDCSHW | | SLELATRLDSRLYALWNRTA |
| | | FYTRWKDWESWYSQSFGLHFSL | | GDCLLDSVLQATWGIYDKDS |
| | | REEQWQEDWAFILSLASQPGAS | | VLRKALHDSLHDCSHWFYTR |
| | | LEQTHIFVLAHILRRPIIVYGV | | WKDWESWYSQSFGLHFSLRE |
| | | KYYKSFRGETLGYTRFQGVYLP | | EQWQEDWAFILSLASQPGAS |
| | | LLWEQSFCWKSPIALGYTRGHF | | LEQTHIFVLAHILRRPIIVY |
| | | SALVAMENDGYGNR | | GVKYYKSFRGETLGYTRFQG |
| | | GAGANLNTDDDVTITFLPLVDS | | VYLPLLWEQSFCWKSPIALG |
| | | ERKLLHVHFLSAQELGNEEQQE | | YTRGHFSAL |
| | | KLLREWLDCCVTEGGVLVAMQK | | |
| | | SSRRRNHPLVTQMVEKWLDRYR | | |
| | | QIRPCTSLSDGEEDEDDEDE | | |
| VCIP1_HUMAN | 84 | MSQPPPPPPPLPPPPPPPEAPQ | 193 | PASGSVSIECTECGQRHEQQ |
| Deubiquiti- | | TPSSLASAAASGGLLKRRDRRI | | QLLGVEEVTDPDVVLHNLLR |
| nating | | LSGSCPDPKCQARLFFPASGSV | | NALLGVTGAPKKNTELVKVM |
| protein | | SIECTECGQRHEQQQLLGVEEV | | GLSNYHCKLLSPILARYGMD |
| VCIP135 | | TDPDVVLHNLLRNALLGVTGAP | | KQTGRAKLLRDMNQGELFDC |
| | | KKNTELVKVMGLSNYHCKLLSP | | ALLGDRAFLIEPEHVNTVGY |
| | | ILARYGMDKQTGRAKLLRDMNQ | | GKDRSGSLLYLHDTLEDIKR |
| | | GELFDCALLGDRAFLIEPEHVN | | ANKSQECLIPVHVDGDGHCL |
| | | TVGYGKDRSGSLLYLHDTLEDI | | VHAVSRALVGRELFWHALRE |
| | | KRANKSQECLIPVHVDGDGHCL | | NLKQHFQQHLARYQALFHDF |
| | | VHAVSRALVGRELFWHALRENL | | IDAAEWEDIINECDPLFVPP |
| | | KQHFQQHLARYQALFHDFIDAA | | EGVPLGLRNIHIFGLANVLH |
| | | EWEDIINECDPLFVPPEGVPLG | | RPIILLDSLSGMRSSGDYSA |
| | | LRNIHIFGLANVLH | | TFLPGLIPAEKCTGKDGHLN |
| | | RPIILLDSLSGMRSSGDYSATF | | KPICIAWSSSGRNHYIPL |
| | | LPGLIPAEKCTGKDGHLNKPIC | | |
| | | IAWSSSGRNHYIPLVGIKGAAL | | |
| | | PKLPMNLLPKAWGVPQDLIKKY | | |
| | | IKLEEDGGCVIGGDRSLQDKYL | | |
| | | LRLVAAMEEVFMDKHGIHPSLV | | |
| | | ADVHQYFYRRTGVIGVQPEEVT | | |
| | | AAAKKAVMDNRLHKCLLCGALS | | |
| | | ELHVPPEWLAPGGKLYNLAKST | | |
| | | HGQLRTDKNYSFPLNNLVCSYD | | |
| | | SVKDVLVPDYGMSNLTACNWCH | | |
| | | GTSVRKVRGDGSIVYLDGDRTN | | |
| | | SRSTGGKCGCGFKHFWDGKEYD | | |
| | | NLPEAFPITLEWGG | | |
| | | RVVRETVYWFQYESDSSLNSNV | | |
| | | YDVAMKLVTKHFPGEFGSEILV | | |
| | | QKVVHTILHQTAKKNPDDYTPV | | |
| | | NIDGAHAQRVGDVQGQESESQL | | |
| | | PTKIILTGQKTKTLHKEELNMS | | |
| | | KTERTIQQNITEQASVMQKRKT | | |
| | | EKLKQEQKGQPRTVSPSTIRDG | | |
| | | PSSAPATPTKAPYSPTTSKEKK | | |
| | | IRITTNDGRQSMVTLKSSTTFF | | |
| | | ELQESIAREFNIPPYLQCIRYG | | |
| | | FPPKELMPPQAGMEKEPVPLQH | | |
| | | GDRITIEILKSKAEGGQSAAAH | | |
| | | SAHTVKQEDIAVTGKLSSKELQ | | |
| | | EQAEKEMYSLCLLA | | |
| | | TLMGEDVWSYAKGLPHMFQQGG | | |
| | | VFYSIMKKTMGMADGKHCTFPH | | |
| | | LPGKTFVYNASEDRLELCVDAA | | |
| | | GHFPIGPDVEDLVKEAVSQVRA | | |
| | | EATTRSRESSPSHGLLKLGSGG | | |
| | | VVKKKSEQLHNVTAFQGKGHSL | | |
| | | GTASGNPHLDPRARETSVVRKH | | |
| | | NTGTDFSNSSTKTEPSVFTASS | | |
| | | SNSELIRIAPGVVTMRDGRQLD | | |
| | | PDLVEAQRKKLQEMVSSIQASM | | |
| | | DRHLRDQSTEQSPSDLPQRKTE | | |
| | | VVSSSAKSGSLQTGLPESFPLT | | |
| | | GGTENLNTETTDGCVADALGAA | | |
| | | FATRSKAQRGNSVEELEEMDSQ | | |
| | | DAEMTNTTEPMDHS | | |
| UCHL3_HUMAN | 85 | MEGQRWLPLEANPEVTNQFLKQ | 194 | QRWLPLEANPEVTNQFLKQL |
| Ubiquitin | | LGLHPNWQFVDVYGMDPELLSM | | GLHPNWQFVDVYGMDPELLS |
| carboxyl- | | VPRPVCAVLLLFPITEKYEVFR | | MVPRPVCAVLLLFPITEKYE |
| terminal | | TEEEEKIKSQGQDVTSSVYFMK | | VFRTEEEEKIKSQGQDVTSS |
| hydrolase | | QTISNACGTIGLIHAIANNKDK | | VYFMKQTISNACGTIGLIHA |
| isozyme L3 | | MHFESGSTLKKFLEESVSMSPE | | IANNKDKMHFESGSTLKKFL |
| | | ERARYLENYDAIRVTHETSAHE | | EESVSMSPEERARYLENYDA |
| | | GQTEAPSIDEKVDLHFIALVHV | | IRVTHETSAHEGQTEAPSID |
| | | DGHLYELDGRKPFPINHGETSD | | EKVDLHFIALVHVDGHLYEL |
| | | ETLLEDAIEVCKKFMERDPDEL | | DGRKPFPINHGETSDETLLE |
| | | RFNAIALSAA | | DAIEVCKKFMERDPDELRFN |
| | | | | AIALSAA |
| UCHL1_HUMAN | 86 | MQLKPMEINPEMLNKVLSRLGV | 86 | MQLKPMEINPEMLNKVLSRL |
| Ubiquitin | | AGQWRFVDVLGLEEESLGSVPA | | GVAGQWRFVDVLGLEEESLG |
| carboxyl- | | PACALLLLFPLTAQHENFRKKQ | | SVPAPACALLLLFPLTAQHE |
| terminal | | IEELKGQEVSPKVYFMKQTIGN | | NFRKKQIEELKGQEVSPKVY |
| hydrolase | | SCGTIGLIHAVANNQDKLGFED | | FMKQTIGNSCGTIGLIHAVA |
| isozyme L1 | | GSVLKQFLSETEKMSPEDRAKC | | NNQDKLGFEDGSVLKQFLSE |
| | | FEKNEAIQAAHDAVAQEGQCRV | | TEKMSPEDRAKCFEKNEAIQ |
| | | DDKVNFHFILFNNVDGHLYELD | | AAHDAVAQEGQCRVDDKVNF |
| | | GRMPFPVNHGASSEDTLLKDAA | | HFILFNNVDGHLYELDGRMP |
| | | KVCREFTEREQGEVRFSAVALC | | FPVNHGASSEDTLLKDAAKV |
| | | KAA | | CREFTEREQGEVRFSAVALC |
| | | | | KAA |
| UCHL5_HUMAN | 87 | MTGNAGEWCLMESDPGVFTELI | 195 | GEWCLMESDPGVFTELIKGF |
| Ubiquitin | | KGFGCRGAQVEEIWSLEPENFE | | GCRGAQVEEIWSLEPENFEK |
| carboxyl- | | KLKPVHGLIFLFKWQPGEEPAG | | LKPVHGLIFLFKWQPGEEPA |
| terminal | | SVVQDSRLDTIFFAKQVINNAC | | GSVVQDSRLDTIFFAKQVIN |
| hydrolase | | ATQAIVSVLLNCTHQDVHLGET | | NACATQAIVSVLLNCTHQDV |
| isozyme L5 | | LSEFKEFSQSFDAAMKGLALSN | | HLGETLSEFKEFSQSEDAAM |
| | | SDVIRQVHNSFARQQMFEFDTK | | KGLALSNSDVIRQVHNSFAR |
| | | TSAKEEDAFHFVSYVPVNGRLY | | QQMFEFDTKTSAKEEDAFHF |
| | | ELDGLREGPIDLGACNQDDWIS | | VSYVPVNGRLYELDGLREGP |
| | | AVRPVIEKRIQKYSEGEIRFNL | | IDLGACNQDDWISAVRPVIE |
| | | MAIVSDRKMIYEQKIAELQRQL | | KRIQKYSEGEIRFNLMAIVS |
| | | AEEEPMDTDQGNSMLSAIQSEV | | DRK |
| | | AKNQMLIEEEVQKLKRYKIENI | | |
| | | RRKHNYLPFIMELLKTLAEHQQ | | |
| | | LIPLVEKAKEKQNAKKAQETK | | |
| ATX3_HUMAN | 88 | MESIFHEKQEGSLCAQHCLNNL | 196 | ESIFHEKQEGSLCAQHCLNN |
| Ataxin-3 | | LQGEYFSPVELSSIAHQLDEEE | | LLQGEYFSPVELSSIAHQLD |
| | | RMRMAEGGVTSEDYRTFLQQPS | | EEERMRMAEGGVTSEDYRTF |
| | | GNMDDSGFFSIQVISNALKVWG | | LQQPSGNMDDSGFFSIQVIS |
| | | LELILFNSPEYQRLRIDPINER | | NALKVWGLELILFNSPEYQR |
| | | SFICNYKEHWFTVRKLGKQWFN | | LRIDPINERSFICNYKEHWF |
| | | LNSLLTGPELISDTYLALFLAQ | | TVRKLGKQWFNLNSLLTGPE |
| | | LQQEGYSIFVVKGDLPDCEADQ | | LISDTYLALFLAQLQQEGYS |
| | | LLQMIRVQQMHRPKLIGEELAQ | | IFVVK |
| | | LKEQRVHKTDLERVLEANDGSG | | |
| | | MLDEDEEDLQRALALSRQEIDM | | |
| | | EDEEADLRRAIQLSMQGSSRNI | | |
| | | SQDMTQTSGTNLTSEELRKRRE | | |
| | | AYFEKQQQKQQQQQQQQQQGDL | | |
| | | SGQSSHPCERPATSSGALGSDL | | |
| | | GDAMSEEDMLQAAVTMSLETVR | | |
| | | NDLKTEGKK | | |
| JOS2_HUMAN | 89 | MSQAPGAQPSPPTVYHERQRLE | 197 | PTVYHERQRLELCAVHALNN |
| Josephin-2 | | LCAVHALNNVLQQQLFSQEAAD | | VLQQQLFSQEAADEICKRLA |
| | | EICKRLAPDSRLNPHRSLLGTG | | PDSRLNPHRSLLGTGNYDVN |
| | | NYDVNVIMAALQGLGLAAVWWD | | VIMAALQGLGLAAVWWDRRR |
| | | RRRPLSQLALPQVLGLILNLPS | | PLSQLALPQVLGLILNLPSP |
| | | PVSLGLLSLPLRRRHWVALRQV | | VSLGLLSLPLRRRHWVALRQ |
| | | DGVYYNLDSKLRAPEALGDEDG | | VDGVYYNLDSKLRAPEALGD |
| | | VRAFLAAALAQGLCEVLLVVTK | | EDGVRAFLAAALAQGLCEVL |
| | | EVEEKGSWLRTD | | LVV |
| JOS1_HUMAN | 90 | MSCVPWKGDKAKSESLELPQAA | 198 | PQAAPPQIYHEKQRRELCAL |
| Josephin-1 | | PPQIYHEKQRRELCALHALNNV | | HALNNVFQDSNAFTRDTLQE |
| | | FQDSNAFTRDTLQEIFQRLSPN | | IFQRLSPNTMVTPHKKSMLG |
| | | TMVTPHKKSMLGNGNYDVNVIM | | NGNYDVNVIMAALQTKGYEA |
| | | AALQTKGYEAVWWDKRRDVGVI | | VWWDKRRDVGVIALTNVMGF |
| | | ALTNVMGFIMNLPSSLCWGPLK | | IMNLPSSLCWGPLKLPLKRQ |
| | | LPLKRQHWICVREVGGAYYNLD | | HWICVREVGGAYYNLDSKLK |
| | | SKLKMPEWIGGESELRKFLKHH | | MPEWIGGESELRKFLKHHLR |
| | | LRGKNCELLLVVPEEVEAHQSW | | GKNCELLLVV |
| | | RTDV | | |
| ATX3L_HUMAN | 91 | MDFIFHEKQEGFLCAQHCLNNL | 199 | DFIFHEKQEGFLCAQHCLNN |
| Ataxin- | | LQGEYFSPVELASIAHQLDEEE | | LLQGEYFSPVELASIAHQLD |
| 3-like | | RMRMAEGGVTSEEYLAFLQQPS | | EEERMRMAEGGVTSEEYLAF |
| protein | | ENMDDTGFFSIQVISNALKFWG | | LQQPSENMDDTGFFSIQVIS |
| | | LEIIHENNPEYQKLGIDPINER | | NALKFWGLEIIHFNNPEYQK |
| | | SFICNYKQHWFTIRKFGKHWFN | | LGIDPINERSFICNYKQHWF |
| | | LNSLLAGPELISDTCLANFLAR | | TIRKFGKHWFNLNSLLAGPE |
| | | LQQQAYSVFVVKGDLPDCEADQ | | LISDTCLANFLARLQQQAYS |
| | | LLQIISVEEMDTPKLNGKKLVK | | VFVVK |
| | | QKEHRVYKTVLEKVSEESDESG | | |
| | | TSDQDEEDFQRALELSRQETNR | | |
| | | EDEHLRSTIELSMQGSSGNTSQ | | |
| | | DLPKTSCVTPASEQPKKIKEDY | | |
| | | FEKHQQEQKQQQQQSDLPGHSS | | |
| | | YLHERPTTSSRAIESDLSDDIS | | |
| | | EGTVQAAVDTILEIMRKNLKIK | | |
| | | GEK | | |
| MINY3_HUMAN | 92 | MSELTKELMELVWGTKSSPGLS | 200 | CRWTQGFVFSESEGSALEQF |
| Ubiquitin | | DTIFCRWTQGFVFSESEGSALE | | EGGPCAVIAPVQAFLLKKLL |
| carboxyl- | | QFEGGPCAVIAPVQAFLLKKLL | | FSSEKSSWRDCSEEEQKELL |
| terminal | | FSSEKSSWRDCSEEEQKELLCH | | CHTLCDILESACCDHSGSYC |
| hydrolase | | TLCDILESACCDHSGSYCLVSW | | LVSWLRGKTTEETASISGSP |
| MINDY-3 | | LRGKTTEETASISGSPAESSCQ | | AESSCQVEHSSALAVEELGF |
| | | VEHSSALAVEELGFERFHALIQ | | ERFHALIQKRSFRSLPELKD |
| | | KRSFRSLPELKDAVLDQYSMWG | | AVLDQYSMWGNKFG |
| | | NKFGVLLFLYSVLLTKGIENIK | | VLLFLYSVLLTKGIENIKNE |
| | | NEIEDASEPLIDPVYGHGSQSL | | IEDASEPLIDPVYGHGSQSL |
| | | INLLLTGHAVSNVWDGDRECSG | | INLLLTGHAVSNVWDGDREC |
| | | MKLLGIHEQAAVGFLTLMEALR | | SGMKLLGIHEQAAVGFLTLM |
| | | YCKVGSYLKSPKFPIWIVGSET | | EALRYCKVGSYLKSPKFPIW |
| | | HLTVFFAKDMALVA | | IVGSETHLTVFFAKDMALVA |
| | | PEAPSEQARRVFQTYDPEDNGF | | PEAPSEQARRVFQTYDPEDN |
| | | IPDSLLEDVMKALDLVSDPEYI | | GFIPDSLLEDVMKALDLVSD |
| | | NLMKNKLDPEGLGIILLGPFLQ | | PEYINLMKNKLDPEGLGIIL |
| | | EFFPDQGSSGPESFTVYHYNGL | | LGPFLQEFFPDQGSSGPESF |
| | | KQSNYNEKVMYVEGTAVVMGFE | | TVYHYNGLKQSNYNEKVMYV |
| | | DPMLQTDDTPIKRCLQTKWPYI | | EGTAVVMGFEDPMLQTDDTP |
| | | ELLWTTDRSPSLN | | IKRCLQTKWPYIELLWTTDR |
| | | | | SPSLN |
| MINY1_HUMAN | 93 | MEYHQPEDPAPGKAGTAEAVIP | 201 | YCVKWIPWKGEQTPIITQST |
| Ubiquitin | | ENHEVLAGPDEHPQDTDARDAD | | NGPCPLLAIMNILFLQWKVK |
| carboxyl- | | GEAREREPADQALLPSQCGDNL | | LPPQKEVITSDELMAHLGNC |
| terminal | | ESPLPEASSAPPGPTLGTLPEV | | LLSIKPQEKSEGLQLNFQQN |
| hydrolase | | ETIRACSMPQELPQSPRTRQPE | | VDDAMTVLPKLATGLDVNVR |
| MINDY-1 | | PDFYCVKWIPWKGEQTPIITQS | | FTGVSDFEYTPECSVFDLLG |
| | | TNGPCPLLAIMNILFLQWKVKL | | IPLYHGWLVDPQSPEAVRAV |
| | | PPQKEVITSDELMAHLGNCLLS | | GKLSYNQLVERIITCKHSSD |
| | | IKPQEKSEGLQLNFQQNVDDAM | | TNLVTEGLIAEQFLETTAAQ |
| | | TVLPKLATGLDVNVRFTGVSDF | | LTYHGLCELTAAAKEGELSV |
| | | EYTPECSVFDLLGIPLYHGWLV | | FFRNNHFSTMTKHKSHLYLL |
| | | DPQSPEAVRAVGKLSYNQLVER | | VTDQGFLQEEQVVWESLHNV |
| | | IITCKHSSDTNLVTEGLIAEQF | | DGDSCFCDSDFHLSHSLGKG |
| | | LETTAAQLTYHGLC | | PGAEGGSGSPETQLQVDQDY |
| | | ELTAAAKEGELSVFFRNNHFST | | LIALSLQQQQPRGPLGLTDL |
| | | MTKHKSHLYLLVTDQGFLQEEQ | | ELAQQLQQEEYQQQQAAQPV |
| | | VVWESLHNVDGDSCFCDSDFHL | | RMRTRVLSLQGRGATSGRPA |
| | | SHSLGKGPGAEGGSGSPETQLQ | | GERRQRPKHESDCILL |
| | | VDQDYLIALSLQQQQPRGPLGL | | |
| | | TDLELAQQLQQEEYQQQQAAQP | | |
| | | VRMRTRVLSLQGRGATSGRPAG | | |
| | | ERRQRPKHESDCILL | | |
| MINY2_HUMAN | 94 | MESSPESLQPLEHGVAAGPASG | 202 | YHIKWIQWKEENTPIITQNE |
| Ubiquitin | | TGSSQEGLQETRLAAGDGPGVW | | NGPCPLLAILNVLLLAWKVK |
| carboxyl- | | AAETSGGNGLGAAAARRSLPDS | | LPPMMEIITAEQLMEYLGDY |
| terminal | | ASPAGSPEVPGPCSSSAGLDLK | | MLDAKPKEISEIQRLNYEQN |
| hydrolase | | DSGLESPAAAEAPLRGQYKVTA | | MSDAMAILHKLQTGLDVNVR |
| MINDY-2 | | SPETAVAGVGHELGTAGDAGAR | | FTGVRVFEYTPECIVFDLLD |
| | | PDLAGTCQAELTAAGSEEPSSA | | IPLYHGWLVDPQIDDIVKAV |
| | | GGLSSSCSDPSPPGESPSLDSL | | GNCSYNQLVEKIISCKQSDN |
| | | ESFSNLHSFPSSCEFNSEEGAE | | SELVSEGFVAEQFLNNTATQ |
| | | NRVPEEEEGAAVLPGAVPLCKE | | LTYHGLCELTSTVQEGELCV |
| | | EEGEETAQVLAASKERFPGQSV | | FFRNNHFSTMTKYKGQLYLL |
| | | YHIKWIQWKEENTPIITQNENG | | VTDQGFLTEEKVVWESLHNV |
| | | PCPLLAILNVLLLAWKVKLPPM | | DGDGNFCDSEFHLRPPSDPE |
| | | MEIITAEQLMEYLG | | TVYKGQQDQIDQDYLMALSL |
| | | DYMLDAKPKEISEIQRLNYEQN | | QQEQQSQEINWEQIPEGISD |
| | | MSDAMAILHKLQTGLDVNVRFT | | LELAKKLQEEEDRRASQYYQ |
| | | GVRVFEYTPECIVFDLLDIPLY | | EQEQAAAAAAAASTQAQQGQ |
| | | HGWLVDPQIDDIVKAVGNCSYN | | PAQASPSSGRQSGNSERKRK |
| | | QLVEKIISCKQSDNSELVSEGF | | EPREKDKEKEKEKNSCVIL |
| | | VAEQFLNNTATQLTYHGLCELT | | |
| | | STVQEGELCVFFRNNHFSTMTK | | |
| | | YKGQLYLLVTDQGFLTEEKVVW | | |
| | | ESLHNVDGDGNFCDSEFHLRPP | | |
| | | SDPETVYKGQQDQIDQDYLMAL | | |
| | | SLQQEQQSQEINWEQIPEGISD | | |
| | | LELAKKLQEEEDRRASQYYQEQ | | |
| | | EQAAAAAAAASTQAQQGQPAQA | | |
| | | SPSSGRQSGNSERKRKEPREKD | | |
| | | KEKEKEKNSCVIL | | |
| MINY4_HUMAN | 95 | MDSLFVEEVAASLVREFLSRKG | 203 | FCCFNEEWKLQSFSFSNTAS |
| Probable | | LKKTCVTMDQERPRSDLSINNR | | LKYGIVQNKGGPCGVLAAVQ |
| ubiquitin | | NDLRKVLHLEFLYKENKAKENP | | GCVLQKLLFEGDSKADCAQG |
| carboxyl- | | LKTSLELITRYFLDHFGNTANN | | LQPSDAHRTRCLVLALADIV |
| terminal | | FTQDTPIPALSVPKKNNKVPSR | | WRAGGRERAVVALASRTQQF |
| hydrolase | | CSETTLVNIYDLSDEDAGWRTS | | SPTGKYKADGVLETLTLHSL |
| MINDY-4 | | LSETSKARHDNLDGDVLGNFVS | | TCYEDLVTFLQQSIHQFEVG |
| | | SKRPPHKSKPMQTVPGETPVLT | | PYGCILLTLSAILSRSTELI |
| | | SAWEKIDKLHSEPSLDVKRMGE | | RQDFDVPTSHLIGAHGYCTQ |
| | | NSRPKSGLIVRGMMSGPIASSP | | ELVNLLLTGKAVSNVFNDVV |
| | | QDSFHRHYLRRSSPSSSSTQPQ | | ELDSGDGNITLLRGIAARSD |
| | | EESRKVPELFVCTQQDILASSN | | IGFLSLFEHYNMCQVGCFLK |
| | | SSPSRTSLGQLSELTVERQKTT | | TPRFPIWVVCSESHFSILFS |
| | | ASSPPHLPSKRLPP | | LQPGLLRDWRTERLFDLYYY |
| | | WDRARPRDPSEDTPAVDGSTDT | | DGLANQQEQIRLTIDTTQTI |
| | | DRMPLKLYLPGGNSRMTQERLE | | SEDTDNDLVPPLELCIRTKW |
| | | RAFKRQGSQPAPVRKNQLLPSD | | KGASVNWNGSDPIL |
| | | KVDGELGALRLEDVEDELIREE | | |
| | | VILSPVPSVLKLQTASKPIDLS | | |
| | | VAKEIKTLLFGSSFCCFNEEWK | | |
| | | LQSFSFSNTASLKYGIVQNKGG | | |
| | | PCGVLAAVQGCVLQKLLFEGDS | | |
| | | KADCAQGLQPSDAHRTRCLVLA | | |
| | | LADIVWRAGGRERAVVALASRT | | |
| | | QQFSPTGKYKADGVLETLTLHS | | |
| | | LTCYEDLVTFLQQSIHQFEVGP | | |
| | | YGCILLTLSAILSRSTELIRQD | | |
| | | FDVPTSHLIGAHGY | | |
| | | CTQELVNLLLTGKAVSNVFNDV | | |
| | | VELDSGDGNITLLRGIAARSDI | | |
| | | GFLSLFEHYNMCQVGCFLKTPR | | |
| | | FPIWVVCSESHFSILFSLQPGL | | |
| | | LRDWRTERLFDLYYYDGLANQQ | | |
| | | EQIRLTIDTTQTISEDTDNDLV | | |
| | | PPLELCIRTKWKGASVNWNGSD | | |
| | | PIL | | |
| STABP_HUMAN | 96 | MSDHGDVSLPPEDRVRALSQLG | 204 | VVPGRLCPQFLQLASANTAR |
| STAM- | | SAVEVNEDIPPRRYFRSGVEII | | GVETCGILCGKLMRNEFTIT |
| binding | | RMASIYSEEGNIEHAFILYNKY | | HVLIPKQSAGSDYCNTENEE |
| protein | | ITLFIEKLPKHRDYKSAVIPEK | | ELFLIQDQQGLITLGWIHTH |
| | | KDTVKKLKEIAFPKAEELKAEL | | PTQTAFLSSVDLHTHCSYQM |
| | | LKRYTKEYTEYNEEKKKEAEEL | | MLPESVAIVCSPKFQETGFF |
| | | ARNMAIQQELEKEKQRVAQQKQ | | KLTDHGLEEISSCRQKGFHP |
| | | QQLEQEQFHAFEEMIRNQELEK | | HSKDPPLFCSCSHVTVVDRA |
| | | ERLKIVQEFGKVDPGLGGPLVP | | VTITDLR |
| | | DLEKPSLDVFPTLTVSSIQPSD | | |
| | | CHTTVRPAKPPVVDRSLKPGAL | | |
| | | SNSESIPTIDGLRHVVVPGRLC | | |
| | | PQFLQLASANTARGVETCGILC | | |
| | | GKLMRNEFTITHVL | | |
| | | IPKQSAGSDYCNTENEEELFLI | | |
| | | QDQQGLITLGWIHTHPTQTAFL | | |
| | | SSVDLHTHCSYQMMLPESVAIV | | |
| | | CSPKFQETGFFKLTDHGLEEIS | | |
| | | SCRQKGFHPHSKDPPLFCSCSH | | |
| | | VTVVDRAVTITDLR | | |
| MPND_HUMAN | 97 | MAAPEPLSPAGGAGEEAPEEDE | 205 | VAVSSNVLFLLDFHSHLTRS |
| MPN | | DEAEAEDPERPNAGAGGGRSGG | | EVVGYLGGRWDVNSQMLTVL |
| domain- | | GGSSVSGGGGGGGAGAGGCGGP | | RAFPCRSRLGDAETAAAIEE |
| containing | | GGALTRRAVTLRVLLKDALLEP | | EIYQSLFLRGLSLVGWYHSH |
| protein | | GAGVLSIYYLGKKFLGDLQPDG | | PHSPALPSLQDIDAQMDYQL |
| | | RIMWQETGQTFNSPSAWATHCK | | RLQGSSNGFQPCLALLCSPY |
| | | KLVNPAKKSGCGWASVKYKGQK | | YSGNPGPESKISPFWVMPPP |
| | | LDKYKATWLRLHQLHTPATAAD | | EMLLVEFYKGSPDLVRLQEP |
| | | ESPASEGEEEELLMEEEEEDVL | | WSQEHTYLDKLKISLASRTP |
| | | AGVSAEDKSRRPLGKSPSEPAH | | KDQSLCHVLEQVCGVLKQGS |
| | | PEATTPGKRVDSKIRVPVRYCM | | |
| | | LGSRDLARNPHTLVEVTSFAAI | | |
| | | NKFQPENVAVSSNVLFLLDFHS | | |
| | | HLTRSEVVGYLGGR | | |
| | | WDVNSQMLTVLRAFPCRSRLGD | | |
| | | AETAAAIEEEIYQSLFLRGLSL | | |
| | | VGWYHSHPHSPALPSLQDIDAQ | | |
| | | MDYQLRLQGSSNGFQPCLALLC | | |
| | | SPYYSGNPGPESKISPFWVMPP | | |
| | | PEMLLVEFYKGSPDLVRLQEPW | | |
| | | SQEHTYLDKLKISLASRTPKDQ | | |
| | | SLCHVLEQVCGVLKQGS | | |
| EMC9_HUMAN | 98 | MGEVEISALAYVKMCLHAARYP | 206 | ALAYVKMCLHAARYPHAAVN |
| ER | | HAAVNGLFLAPAPRSGECLCLT | | GLFLAPAPRSGECLCLTDCV |
| membrane | | DCVPLFHSHLALSVMLEVALNQ | | PLFHSHLALSVMLEVALNQV |
| protein | | VDVWGAQAGLVVAGYYHANAAV | | DVWGAQAGLVVAGYYHANAA |
| complex | | NDQSPGPLALKIAGRIAEFFPD | | VNDQSPGPLALKIAGRIAEF |
| subunit 9 | | AVLIMLDNQKLVPQPRVPPVIV | | FPDAVLIMLDNQKLVPQPRV |
| | | LENQGLRWVPKDKNLVMWRDWE | | PPVIVLENQGLRWVPKDKNL |
| | | ESRQMVGALLEDRAHQHLVDFD | | VMWRDWEESRQMVGALLEDR |
| | | CHLDDIRQDWTNQRLNTQITQW | | AHQHLVDEDCHLDDIRQDWT |
| | | VGPTNGNGNA | | NQRLNTQITQWVGPTNGNGN |
| | | | | A |
| PSDE_HUMAN | 99 | MDRLLRLGGGMPGLGQGPPTDA | 207 | QVYISSLALLKMLKHGRAGV |
| 26S | | PAVDTAEQVYISSLALLKMLKH | | PMEVMGLMLGEFVDDYTVRV |
| proteasome | | GRAGVPMEVMGLMLGEFVDDYT | | IDVFAMPQSGTGVSVEAVDP |
| non-ATPase | | VRVIDVFAMPQSGTGVSVEAVD | | VFQAKMLDMLKQTGRPEMVV |
| regulatory | | PVFQAKMLDMLKQTGRPEMVVG | | GWYHSHPGFGCWLSGVDINT |
| subunit 14 | | WYHSHPGFGCWLSGVDINTQQS | | QQSFEALSERAVAVVVDPIQ |
| | | FEALSERAVAVVVDPIQSVKGK | | SVKGKVVIDAFRLINANMMV |
| | | VVIDAFRLINANMMVLGHEPRQ | | LGHEPRQTTSNLGHLNKPSI |
| | | TTSNLGHLNKPSIQALIHGLNR | | QALIHGLNRHYYSITINYRK |
| | | HYYSITINYRKNELEQKMLLNL | | NELEQKMLLNLHKKSWMEGL |
| | | HKKSWMEGLTLQDYSEHCKHNE | | TLQDYSEHCKHNESVVKEML |
| | | SVVKEMLELAKNYNKAVEEEDK | | ELAKNYNKAVEEEDKMTPEQ |
| | | MTPEQLAIKNVGKQDPKRHLEE | | LAIKNVGKQDPKRHLEEHVD |
| | | HVDVLMTSNIVQCLAAMLDTVV | | VLMTSNIVQCLAAMLDTVVF |
| | | FK | | K |
| MYSM1_HUMAN | 100 | MAAEEADVDIEGDVVAAAGAQP | 208 | QVKVASEALLIMDLHAHVSM |
| Histone | | GSGENTASVLQKDHYLDSSWRT | | AEVIGLLGGRYSEVDKVVEV |
| H2A | | ENGLIPWTLDNTISEENRAVIE | | CAAEPCNSLSTGLQCEMDPV |
| deubiquitinase | | KMLLEEEYYLSKKSQPEKVWLD | | SQTQASETLAVRGFSVIGWY |
| MYSM1 | | QKEDDKKYMKSLQKTAKIMVHS | | HSHPAFDPNPSLRDIDTQAK |
| | | PTKPASYSVKWTIEEKELFEQG | | YQSYFSRGGAKFIGMIVSPY |
| | | LAKFGRRWTKISKLIGSRTVLQ | | NRNNPLPYSQITCLVISEEI |
| | | VKSYARQYFKNKVKCGLDKETP | | SPDGSYRLPYKFEVQQMLEE |
| | | NQKTGHNLQVKNEDKGTKAWTP | | PQWGLVFEKTRWIIEKYRLS |
| | | SCLRGRADPNLNAVKIEKLSDD | | HSSVPMDKIFRRDSDLTCLQ |
| | | EEVDITDEVDELSSQTPQKNSS | | KLLECMRKTLSKVTNCFMAE |
| | | SDLLLDFPNSKMHETNQGEFIT | | EFLTEIENLFLSNYKSNQEN |
| | | SDSQEALFSKSSRGCLQNEKQD | | GVTEENCTKELLM |
| | | ETLSSSEITLWTEK | | |
| | | QSNGDKKSIELNDQKFNELIKN | | |
| | | CNKHDGRGIIVDARQLPSPEPC | | |
| | | EIQKNLNDNEMLFHSCQMVEES | | |
| | | HEEEELKPPEQEIEIDRNIIQE | | |
| | | EEKQAIPEFFEGRQAKTPERYL | | |
| | | KIRNYILDQWEICKPKYLNKTS | | |
| | | VRPGLKNCGDVNCIGRIHTYLE | | |
| | | LIGAINFGCEQAVYNRPQTVDK | | |
| | | VRIRDRKDAVEAYQLAQRLQSM | | |
| | | RTRRRRVRDPWGNWCDAKDLEG | | |
| | | QTFEHLSAEELAKRREEEKGRP | | |
| | | VKSLKVPRPTKSSFDPFQLIPC | | |
| | | NFFSEEKQEPFQVKVASEALLI | | |
| | | MDLHAHVSMAEVIG | | |
| | | LLGGRYSEVDKVVEVCAAEPCN | | |
| | | SLSTGLQCEMDPVSQTQASETL | | |
| | | AVRGFSVIGWYHSHPAFDPNPS | | |
| | | LRDIDTQAKYQSYFSRGGAKFI | | |
| | | GMIVSPYNRNNPLPYSQITCLV | | |
| | | ISEEISPDGSYRLPYKFEVQQM | | |
| | | LEEPQWGLVFEKTRWIIEKYRL | | |
| | | SHSSVPMDKIFRRDSDLTCLQK | | |
| | | LLECMRKTLSKVINCFMAEEFL | | |
| | | TEIENLFLSNYKSNQENGVTEE | | |
| | | NCTKELLM | | |
| ABRX2_HUMAN | 101 | MAASISGYTFSAVCFHSANSNA | 209 | AVCFHSANSNADHEGFLLGE |
| BRISC | | DHEGFLLGEVRQEETFSISDSQ | | VRQEETFSISDSQISNTEFL |
| complex | | ISNTEFLQVIEIHNHQPCSKLF | | QVIEIHNHQPCSKLESFYDY |
| subunit | | SFYDYASKVNEESLDRILKDRR | | ASKVNEESLDRILKDRRKKV |
| Abraxas 2 | | KKVIGWYRFRRNTQQQMSYREQ | | IGWYRFRRNTQQQMSYREQV |
| | | VLHKQLTRILGVPDLVFLLESF | | LHKQLTRIL |
| | | ISTANNSTHALEYVLFRPNRRY | | GVPDLVFLLFSFISTANNST |
| | | NQRISLAIPNLGNTSQQEYKVS | | HALEYVLFRPNRRYNQRISL |
| | | SVPNTSQSYAKVIKEHGTDFFD | | AIPNLGNTSQQEYKVSSVPN |
| | | KDGVMKDIRAIYQVYNALQEKV | | TSQSYAKVIKEHGTDFFDKD |
| | | QAVCADVEKSERVVESCQAEVN | | GVMKDIRAIYQVYNALQEKV |
| | | KLRRQITQRKNEKEQERRLQQA | | QAVCADVEKSERVVESCQAE |
| | | VLSRQMPSESLDPAFSPRMPSS | | VNKLRRQITQRKNEKEQERR |
| | | GFAAEGRSTLGDAE | | LQQAVLSRQMPSESLDPAFS |
| | | ASDPPPPYSDFHPNNQESTLSH | | PRMPSSGFAAEGRSTLGDAE |
| | | SRMERSVFMPRPQAVGSSNYAS | | ASDPPPPYSDFHPNNQESTL |
| | | TSAGLKYPGSGADLPPPQRAAG | | SHSRMERSVFMPRPQAVGSS |
| | | DSGEDSDDSDYENLIDPTEPSN | | NYASTSAGLKYPGSGADLPP |
| | | SEYSHSKDSRPMAHPDEDPRNT | | PQRAAGDSGEDSDDSDYENL |
| | | QTSQI | | IDPTEPSNSEYSHSKDSRPM |
| | | | | AHPDEDPRNTQTSQI |
| PRP8_HUMAN | 102 | MAGVFPYRGPGNPVPGPLAPLP | 210 | FNPRTGQLELKIIHTSVWAG |
| Pre-mRNA- | | DYMSEEKLQEKARKWQQLQAKR | | QKRLGQLAKWKTAEEVAALI |
| processing- | | YAEKRKFGFVDAQKEDMPPEHV | | RSLPVEEQPKQIIVTRKGML |
| splicing | | RKIIRDHGDMTNRKFRHDKRVY | | DPLEVHLLDFPNIVIKGSEL |
| factor 8 | | LGALKYMPHAVLKLLENMPMPW | | QLPFQACLKVEKFGDLILKA |
| | | EQIRDVPVLYHITGAISFVNEI | | TEPQMVLFNLYDDWLKTISS |
| | | PWVIEPVYISQWGSMWIMMRRE | | YTAFSRLILILRALHVNNDR |
| | | KRDRRHFKRMRFPPFDDEEPPL | | AKVILKPDKTTITEPHHIWP |
| | | DYADNILDVEPLEAIQLELDPE | | TLTDEEWIKVEVQLKDLILA |
| | | EDAPVLDWFYDHQPLRDSRKYV | | DYGKKNNVNVASLTQSEIRD |
| | | NGSTYQRWQFTLPMMSTLYRLA | | IILGMEISAPSQQRQQIAEI |
| | | NQLLTDLVDDNYFYLFDLKAFF | | EKQTKEQSQLTATQTRTVNK |
| | | TSKALNMAIPGGPKFEPLVRDI | | HGDEIITSTTSNYETQTFSS |
| | | NLQDEDWNEFNDIN | | KTEWRVRAISAANLHLRTNH |
| | | KIIIRQPIRTEYKIAFPYLYNN | | IYVSSDDIKETGYTYILPKN |
| | | LPHHVHLTWYHTPNVVFIKTED | | VLKKFICISDLRAQIAGYLY |
| | | PDLPAFYFDPLINPISHRHSVK | | GVSPPDNPQVKEIRCIVMVP |
| | | SQEPLPDDDEEFELPEFVEPFL | | QWGTHQTVHLPGQLPQHEYL |
| | | KDTPLYTDNTANGIALLWAPRP | | KEMEPLGWIHTQPNESPQLS |
| | | FNLRSGRTRRALDIPLVKNWYR | | PQDVTTHAKIMADNPSWDGE |
| | | EHCPAGQPVKVRVSYQKLLKYY | | KTIIITCSFTPGSCTLTAYK |
| | | VLNALKHRPPKAQKKRYLFRSF | | LTPSGYEWGRQNTDKGNNPK |
| | | KATKFFQSTKLDWVEVGLQVCR | | GYLPSHYERVQMLLSDRFLG |
| | | QGYNMLNLLIHRKNLNYLHLDY | | FFMVPAQSSWNYNFMGVRHD |
| | | NFNLKPVKTLTTKERKKSRFGN | | PNMKYELQLANPKEFYHEVH |
| | | AFHLCREVLRLTKLVVDSHVQY | | RPSHFLNFALLQEGEVYSAD |
| | | RLGNVDAFQLADGLQYIFAHVG | | REDLYA |
| | | QLTGMYRYKYKLMR | | |
| | | QIRMCKDLKHLIYYRFNTGPVG | | |
| | | KGPGCGFWAAGWRVWLFFMRGI | | |
| | | TPLLERWLGNLLARQFEGRHSK | | |
| | | GVAKTVTKQRVESHFDLELRAA | | |
| | | VMHDILDMMPEGIKQNKARTIL | | |
| | | QHLSEAWRCWKANIPWKVPGLP | | |
| | | TPIENMILRYVKAKADWWTNTA | | |
| | | HYNRERIRRGATVDKTVCKKNL | | |
| | | GRLTRLYLKAEQERQHNYLKDG | | |
| | | PYITAEEAVAVYTTTVHWLESR | | |
| | | RFSPIPFPPLSYKHDTKLLILA | | |
| | | LERLKEAYSVKSRLNQSQREEL | | |
| | | GLIEQAYDNPHEALSRIKRHLL | | |
| | | TQRAFKEVGIEFMD | | |
| | | LYSHLVPVYDVEPLEKITDAYL | | |
| | | DQYLWYEADKRRLFPPWIKPAD | | |
| | | TEPPPLLVYKWCQGINNLQDVW | | |
| | | ETSEGECNVMLESRFEKMYEKI | | |
| | | DLTLLNRLLRLIVDHNIADYMT | | |
| | | AKNNVVINYKDMNHTNSYGIIR | | |
| | | GLQFASFIVQYYGLVMDLLVLG | | |
| | | LHRASEMAGPPQMPNDFLSFQD | | |
| | | IATEAAHPIRLFCRYIDRIHIF | | |
| | | FRFTADEARDLIQRYLTEHPDP | | |
| | | NNENIVGYNNKKCWPRDARMRL | | |
| | | MKHDVNLGRAVFWDIKNRLPRS | | |
| | | VTTVQWENSFVSVYSKDNPNLL | | |
| | | FNMCGFECRILPKC | | |
| | | RTSYEEFTHKDGVWNLQNEVTK | | |
| | | ERTAQCFLRVDDESMQRFHNRV | | |
| | | RQILMASGSTTFTKIVNKWNTA | | |
| | | LIGLMTYFREAVVNTQELLDLL | | |
| | | VKCENKIQTRIKIGLNSKMPSR | | |
| | | FPPVVFYTPKELGGLGMLSMGH | | |
| | | VLIPQSDLRWSKQTDVGITHFR | | |
| | | SGMSHEEDQLIPNLYRYIQPWE | | |
| | | SEFIDSQRVWAEYALKRQEAIA | | |
| | | QNRRLTLEDLEDSWDRGIPRIN | | |
| | | TLFQKDRHTLAYDKGWRVRTDF | | |
| | | KQYQVLKQNPFWWTHQRHDGKL | | |
| | | WNLNNYRTDMIQALGGVEGILE | | |
| | | HTLFKGTYFPTWEG | | |
| | | LFWEKASGFEESMKWKKLTNAQ | | |
| | | RSGLNQIPNRRFTLWWSPTINR | | |
| | | ANVYVGFQVQLDLTGIFMHGKI | | |
| | | PTLKISLIQIFRAHLWQKIHES | | |
| | | IVMDLCQVFDQELDALEIETVQ | | |
| | | KETIHPRKSYKMNSSCADILLF | | |
| | | ASYKWNVSRPSLLADSKDVMDS | | |
| | | TTTQKYWIDIQLRWGDYDSHDI | | |
| | | ERYARAKFLDYTTDNMSIYPSP | | |
| | | TGVLIAIDLAYNLHSAYGNWFP | | |
| | | GSKPLIQQAMAKIMKANPALYV | | |
| | | LRERIRKGLQLYSSEPTEPYLS | | |
| | | SQNYGELFSNQIIWFVDDTNVY | | |
| | | RVTIHKTFEGNLTT | | |
| | | KPINGAIFIFNPRTGQLFLKII | | |
| | | HTSVWAGQKRLGQLAKWKTAEE | | |
| | | VAALIRSLPVEEQPKQIIVTRK | | |
| | | GMLDPLEVHLLDEPNIVIKGSE | | |
| | | LQLPFQACLKVEKFGDLILKAT | | |
| | | EPQMVLFNLYDDWLKTISSYTA | | |
| | | FSRLILILRALHVNNDRAKVIL | | |
| | | KPDKTTITEPHHIWPTLTDEEW | | |
| | | IKVEVQLKDLILADYGKKNNVN | | |
| | | VASLTQSEIRDIILGMEISAPS | | |
| | | QQRQQIAEIEKQTKEQSQLTAT | | |
| | | QTRTVNKHGDEIITSTTSNYET | | |
| | | QTFSSKTEWRVRAISAANLHLR | | |
| | | TNHIYVSSDDIKET | | |
| | | GYTYILPKNVLKKFICISDLRA | | |
| | | QIAGYLYGVSPPDNPQVKEIRC | | |
| | | IVMVPQWGTHQTVHLPGQLPQH | | |
| | | EYLKEMEPLGWIHTQPNESPQL | | |
| | | SPQDVTTHAKIMADNPSWDGEK | | |
| | | TIIITCSFTPGSCTLTAYKLTP | | |
| | | SGYEWGRQNTDKGNNPKGYLPS | | |
| | | HYERVQMLLSDRFLGFFMVPAQ | | |
| | | SSWNYNFMGVRHDPNMKYELQL | | |
| | | ANPKEFYHEVHRPSHFLNFALL | | |
| | | QEGEVYSADREDLYA | | |
| NPL4_HUMAN | 103 | MAESIIIRVQSPDGVKRITATK | 211 | QPSAITLNRQKYRHVDNIME |
| Mitochondrial | | RETAATFLKKVAKEFGFQNNGF | | ENHTVADRFLDFWRKTGNQH |
| protein | | SVYINRNKTGEITASSNKSLNL | | FGYLYGRYTEHKDIPLGIRA |
| localization | | LKIKHGDLLFLFPSSLAGPSSE | | EVAAIYEPPQIGTQNSLELL |
| protein 4 | | METSVPPGFKVFGAPNVVEDEI | | EDPKAEVVDEIAAKLGLRKV |
| homolog | | DQYLSKQDGKIYRSRDPQLCRH | | GWIFTDLVSEDTRKGTVRYS |
| | | GPLGKCVHCVPLEPFDEDYLNH | | RNKDTYFLSSEECITAGDFQ |
| | | LEPPVKHMSFHAYIRKLTGGAD | | NKHPNMCRLSPDGHFGSKFV |
| | | KGKFVALENISCKIKSGCEGHL | | TAVATGGPDNQVHFEGYQVS |
| | | PWPNGICTKCQPSAITLNRQKY | | NQCMALVRDECLLPCKDAPE |
| | | RHVDNIMFENHTVADRFLDEWR | | LGYAKESSSEQYVPDVFYKD |
| | | KTGNQHFGYLYGRYTEHKDIPL | | VDKFGNEITQLARPLPVEYL |
| | | GIRAEVAAIYEPPQIGTQNSLE | | IIDITTTFPKDPVYTFSISQ |
| | | LLEDPKAEVVDEIA | | NPFPIENRDVLGETQDFHSL |
| | | AKLGLRKVGWIFTDLVSEDTRK | | ATYLSQNTSSVELDTISDFH |
| | | GTVRYSRNKDTYFLSSEECITA | | LLLFLVTNEVMPLQDSISLL |
| | | GDFQNKHPNMCRLSPDGHFGSK | | LEAVRTRNEELAQTWKRSEQ |
| | | FVTAVATGGPDNQVHFEGYQVS | | WATIEQLCSTVGGQLPGLHE |
| | | NQCMALVRDECLLPCKDAPELG | | YGAVGGSTHTATAAMWACQH |
| | | YAKESSSEQYVPDVFYKDVDKF | | CTFMNQPGTGHCEMCSLPRT |
| | | GNEITQLARPLPVEYLIIDITT | | |
| | | TFPKDPVYTFSISQNPFPIENR | | |
| | | DVLGETQDFHSLATYLSQNTSS | | |
| | | VFLDTISDFHLLLFLVTNEVMP | | |
| | | LQDSISLLLEAVRTRNEELAQT | | |
| | | WKRSEQWATIEQLCSTVGGQLP | | |
| | | GLHEYGAVGGSTHTATAAMWAC | | |
| | | QHCTFMNQPGTGHCEMCSLPRT | | |
| EMC8_HUMAN | 104 | MPGVKLTTQAYCKMVLHGAKYP | 212 | TQAYCKMVLHGAKYPHCAVN |
| ER | | HCAVNGLLVAEKQKPRKEHLPL | | GLLVAEKQKPRKEHLPLGGP |
| membrane | | GGPGAHHTLFVDCIPLFHGTLA | | GAHHTLFVDCIPLFHGTLAL |
| protein | | LAPMLEVALTLIDSWCKDHSYV | | APMLEVALTLIDSWCKDHSY |
| complex | | IAGYYQANERVKDASPNQVAEK | | VIAGYYQANERVKDASPNQV |
| subunit 8 | | VASRIAEGFSDTALIMVDNTKF | | AEKVASRIAEGESDTALIMV |
| | | TMDCVAPTIHVYEHHENRWRCR | | DNTKFTMDCVAPTIHVYEHH |
| | | DPHHDYCEDWPEAQRISASLLD | | ENRWRCRDPHHDYCEDWPEA |
| | | SRSYETLVDFDNHLDDIRNDWT | | QRISASLLDSRSYETLVDFD |
| | | NPEINKAVLHLC | | NHLDDIRNDWTNPEINKAVL |
| | | | | HLC |
| ABRX1_HUMAN | 105 | MEGESTSAVLSGFVLGALAFQH | 213 | GFVLGALAFQHLNTDSDTEG |
| BRCA1-A | | LNTDSDTEGFLLGEVKGEAKNS | | FLLGEVKGEAKNSITDSQMD |
| complex | | ITDSQMDDVEVVYTIDIQKYIP | | DVEVVYTIDIQKYIPCYQLF |
| subunit | | CYQLFSFYNSSGEVNEQALKKI | | SFYNSSGEVNEQALKKILSN |
| Abraxas 1 | | LSNVKKNVVGWYKFRRHSDQIM | | VKKNVVGWYKFRRHSDQIMT |
| | | TFRERLLHKNLQEHFSNQDLVF | | FRERLLHKNLQEHFSNQDLV |
| | | LLLTPSIITESCSTHRLEHSLY | | FLLLTPSIITESCSTHRLEH |
| | | KPQKGLFHRVPLVVANLGMSEQ | | SLYKPQKGLFHRVPLVVANL |
| | | LGYKTVSGSCMSTGFSRAVQTH | | GMSEQLGYKTVSGSCMSTGF |
| | | SSKFFEEDGSLKEVHKINEMYA | | SRAVQTHSSKFFEEDGSLKE |
| | | SLQEELKSICKKVEDSEQAVDK | | VHKINEMYASLQEELKSICK |
| | | LVKDVNRLKREIEKRRGAQIQA | | KVEDSEQAVDKLVKDVNRLK |
| | | AREKNIQKDPQENIFLCQALRT | | REIEKRRGAQIQAAREKNIQ |
| | | FFPNSEFLHSCVMS | | KDPQENIFLCQALRTFFPNS |
| | | LKNRHVSKSSCNYNHHLDVVDN | | EFLHSCVMSLKNRHVSKSSC |
| | | LTLMVEHTDIPEASPASTPQII | | NYNHHLDVVDNLTLMVEHTD |
| | | KHKALDLDDRWQFKRSRLLDTQ | | IPEASPASTPQIIKHKALDL |
| | | DKRSKADTGSSNQDKASKMSSP | | DDRWQFKRSRLLDTQDKRSK |
| | | ETDEEIEKMKGFGEYSRSPTF | | ADTGSSNQDKASKMSSPETD |
| | | | | EEIEKMKGFGEYSRSPTF |
| STALP_HUMAN | 106 | MDQPFTVNSLKKLAAMPDHTDV | 214 | VVLPEDLCHKFLQLAESNTV |
| AMSH- | | SLSPEERVRALSKLGCNITISE | | RGIETCGILCGKLTHNEFTI |
| like protease | | DITPRRYFRSGVEMERMASVYL | | THVIVPKQSAGPDYCDMENV |
| | | EEGNLENAFVLYNKFITLFVEK | | EELFNVQDQHDLLTLGWIHT |
| | | LPNHRDYQQCAVPEKQDIMKKL | | HPTQTAFLSSVDLHTHCSYQ |
| | | KEIAFPRTDELKNDLLKKYNVE | | LMLPEAIAIVCSPKHKDTGI |
| | | YQEYLQSKNKYKAEILKKLEHQ | | FRLTNAGMLEVSACKKKGFH |
| | | RLIEAERKRIAQMRQQQLESEQ | | PHTKEPRLFSICKHVLVKDI |
| | | FLFFEDQLKKQELARGQMRSQQ | | KIIVLDLR |
| | | TSGLSEQIDGSALSCFSTHQNN | | |
| | | SLLNVFADQPNKSDATNYASHS | | |
| | | PPVNRALTPAATLSAVQNLVVE | | |
| | | GLRCVVLPEDLCHKFLQLAESN | | |
| | | TVRGIETCGILCGK | | |
| | | LTHNEFTITHVIVPKQSAGPDY | | |
| | | CDMENVEELFNVQDQHDLLTLG | | |
| | | WIHTHPTQTAFLSSVDLHTHCS | | |
| | | YQLMLPEAIAIVCSPKHKDTGI | | |
| | | FRLTNAGMLEVSACKKKGFHPH | | |
| | | TKEPRLFSICKHVLVKDIKIIV | | |
| | | LDLR | | |
| CSN6_HUMAN | 107 | MAAAAAAAAATNGTGGSSGMEV | 215 | VALHPLVILNISDHWIRMRS |
| COP9 | | DAAVVPSVMACGVTGSVSVALH | | QEGRPVQVIGALIGKQEGRN |
| signalosome | | PLVILNISDHWIRMRSQEGRPV | | IEVMNSFELLSHTVEEKIII |
| complex | | QVIGALIGKQEGRNIEVMNSFE | | DKEYYYTKEEQFKQVFKELE |
| subunit 6 | | LLSHTVEEKIIIDKEYYYTKEE | | FLGWYTTGGPPDPSDIHVHK |
| | | QFKQVFKELEFLGWYTTGGPPD | | QVCEIIESPLFLKLNPMTKH |
| | | PSDIHVHKQVCEIIESPLFLKL | | TDLPVSVFESVIDIINGEAT |
| | | NPMTKHTDLPVSVFESVIDIIN | | MLFAELTYTLATEEAERIGV |
| | | GEATMLFAELTYTLATEEAERI | | DHVARMTATGSGENSTVAEH |
| | | GVDHVARMTATGSGENSTVAEH | | LIAQHSAIKMLHSRVKLILE |
| | | LIAQHSAIKMLHSRVKLILEYV | | YVKASEAGEVPFNHEILREA |
| | | KASEAGEVPFNHEILREAYALC | | YALCHCLPVLSTDKFKTDFY |
| | | HCLPVLSTDKFKTDFYDQCNDV | | DQCNDVGLMAYLGTITKTCN |
| | | GLMAYLGTITKTCNTMNQFVNK | | TMNQFVNKFNVLYDRQGIGR |
| | | FNVLYDRQGIGRRMRGLFF | | RMRGLFF |
| EIF3F_HUMAN | 108 | MATPAVPVSAPPATPTPVPAAA | 216 | VRLHPVILASIVDSYERRNE |
| Eukaryotic | | PASVPAPTPAPAAAPVPAAAPA | | GAARVIGTLLGTVDKHSVEV |
| translation | | SSSDPAAAAAATAAPGQTPASA | | TNCFSVPHNESEDEVAVDME |
| initiation | | QAPAQTPAPALPGPALPGPFPG | | FAKNMYELHKKVSPNELILG |
| factor 3 | | GRVVRLHPVILASIVDSYERRN | | WYATGHDITEHSVLIHEYYS |
| subunit F | | EGAARVIGTLLGTVDKHSVEVT | | REAPNPIHLTVDTSLQNGRM |
| | | NCFSVPHNESEDEVAVDMEFAK | | SIKAYVSTLMGVPGRTMGVM |
| | | NMYELHKKVSPNELILGWYATG | | FTPLTVKYAYYDTERIGVDL |
| | | HDITEHSVLIHEYYSREAPNPI | | IMKTCFSPNRVIGLSSDLQQ |
| | | HLTVDTSLQNGRMSIKAYVSTL | | VGGASARIQDALSTVLQYAE |
| | | MGVPGRTMGVMFTPLTVKYAYY | | DVLSGKVSADNTVGRFLMSL |
| | | DTERIGVDLIMKTCFSPNRVIG | | VNQVPKIVPDDFETMLNSNI |
| | | LSSDLQQVGGASARIQDALSTV | | NDLLMVTYLANLTQSQIALN |
| | | LQYAEDVLSGKVSADNTVGRFL | | EKLVNL |
| | | MSLVNQVPKIVPDDFETMLNSN | | |
| | | INDLLMVTYLANLTQSQIALNE | | |
| | | KLVNL | | |
| PSMD7_HUMAN | 109 | MPELAVQKVVVHPLVLLSVVDH | 217 | VVVHPLVLLSVVDHFNRIGK |
| 26S | | FNRIGKVGNQKRVVGVLLGSWQ | | VGNQKRVVGVLLGSWQKKVL |
| proteasome | | KKVLDVSNSFAVPFDEDDKDDS | | DVSNSFAVPFDEDDKDDSVW |
| non-ATPase | | VWFLDHDYLENMYGMFKKVNAR | | FLDHDYLENMYGMFKKVNAR |
| regulatory | | ERIVGWYHTGPKLHKNDIAINE | | ERIVGWYHTGPKLHKNDIAI |
| subunit 7 | | LMKRYCPNSVLVIIDVKPKDLG | | NELMKRYCPNSVLVIIDVKP |
| | | LPTEAYISVEEVHDDGTPTSKT | | KDLGLPTEAYISVEEVHDDG |
| | | FEHVTSEIGAEEAEEVGVEHLL | | TPTSKTFEHVTSEIGAEEAE |
| | | RDIKDTTVGTLSQRITNQVHGL | | EVGVEHLLRDIKDTTVGTLS |
| | | KGLNSKLLDIRSYLEKVATGKL | | QRITNQVHGLKGLNSKLLDI |
| | | PINHQIIYQLQDVFNLLPDVSL | | RSYLEKVATGKLPINHQIIY |
| | | QEFVKAFYLKTNDQMVVVYLAS | | QLQDVFNLLPDVSLQEFVKA |
| | | LIRSVVALHNLINNKIANRDAE | | FYLKTNDQMVVVYLASLIRS |
| | | KKEGQEKEESKKDRKEDKEKDK | | VVALHNLINNKIANRDAEKK |
| | | DKEKSDVKKEEKKEKK | | EGQEKEESKKDRKEDKEKDK |
| | | | | DKEKSDVKKEEKKEKK |
| EIF3H_HUMAN | 110 | MASRKEGTGSTATSSSSTAGAA | 218 | VQIDGLVVLKIIKHYQEEGQ |
| Eukaryotic | | GKGKGKGGSGDSAVKQVQIDGL | | GTEVVQGVLLGLVVEDRLEI |
| translation | | VVLKIIKHYQEEGQGTEVVQGV | | TNCFPFPQHTEDDADFDEVQ |
| initiation | | LLGLVVEDRLEITNCFPFPQHT | | YQMEMMRSLRHVNIDHLHVG |
| factor 3 | | EDDADFDEVQYQMEMMRSLRHV | | WYQSTYYGSFVTRALLDSQF |
| subunit H | | NIDHLHVGWYQSTYYGSFVTRA | | SYQHAIEESVVLIYDPIKTA |
| | | LLDSQFSYQHAIEESVVLIYDP | | QGSLSLKAYRLTPKLMEVCK |
| | | IKTAQGSLSLKAYRLTPKLMEV | | EKDFSPEALKKANITFEYMF |
| | | CKEKDFSPEALKKANITFEYMF | | EEVPIVIKNSHLINVLMWEL |
| | | EEVPIVIKNSHLINVLMWELEK | | EKKSAVADKHELLSLASSNH |
| | | KSAVADKHELLSLASSNHLG | | LGKNLQLLMDRVDEMSQDIV |
| | | KNLQLLMDRVDEMSQDIVKYNT | | KYNTYMRNTSKQQQQKHQYQ |
| | | YMRNTSKQQQQKHQYQQRRQQE | | QRRQQENMQRQSRGEPPLPE |
| | | NMQRQSRGEPPLPEEDLSKLFK | | EDLSKLFKPPQPPARMDSLL |
| | | PPQPPARMDSLLIAGQINTYCQ | | IAGQINTYCQNIKEFTAQNL |
| | | NIKEFTAQNLGKLEMAQALQEY | | GKLFMAQALQEYNN |
| | | NN | | |
| CSN5_HUMAN | 111 | MAASGSGMAQKTWELANNMQEA | 219 | YCKISALALLKMVMHARSGG |
| COP9 | | QSIDEIYKYDKKQQQEILAAKP | | NLEVMGLMLGKVDGETMIIM |
| signalosome | | WTKDHHYFKYCKISALALLKMV | | DSFALPVEGTETRVNAQAAA |
| complex | | MHARSGGNLEVMGLMLGKVDGE | | YEYMAAYIENAKQVGRLENA |
| subunit 5 | | TMIIMDSFALPVEGTETRVNAQ | | IGWYHSHPGYGCWLSGIDVS |
| | | AAAYEYMAAYIENAKQVGRLEN | | TQMLNQQFQEPFVAVVIDPT |
| | | AIGWYHSHPGYGCWLSGIDVST | | RTISAGKVNLGAFRTYPKGY |
| | | QMLNQQFQEPFVAVVIDPTRTI | | KPPDEGPSEYQTIPLNKIED |
| | | SAGKVNLGAFRTYPKGYKPPDE | | FGVHCKQYYALEVSYFKSSL |
| | | GPSEYQTIPLNKIEDFGVHCKQ | | DRKLLELLWNKYWVNTLSSS |
| | | YYALEVSYFKSSLDRKLLELLW | | SLLTNADYTTGQVFDLSEKL |
| | | NKYWVNTLSSSSLLTNADYTTG | | EQSEAQLGRGSFMLGLETHD |
| | | QVEDLSEKLEQSEAQLGRGSFM | | RKSEDKLAKATRDSCKTTIE |
| | | LGLETHDRKSEDKLAKATRDSC | | AIHGLMSQVIKDKLFNQINI |
| | | KTTIEAIHGLMSQVIKDKLFNQ | | S |
| | | INIS | | |
| BRCC3_HUMAN | 112 | MAVQVVQAVQAVHLESDAFLVC | 220 | VHLESDAFLVCLNHALSTEK |
| Lys-63- | | LNHALSTEKEEVMGLCIGELND | | EEVMGLCIGELNDDTRSDSK |
| specific | | DTRSDSKFAYTGTEMRTVAEKV | | FAYTGTEMRTVAEKVDAVRI |
| deubiquitinase | | DAVRIVHIHSVIILRRSDKRKD | | VHIHSVIILRRSDKRKDRVE |
| BRCC36 | | RVEISPEQLSAASTEAERLAEL | | ISPEQLSAASTEAERLAELT |
| | | TGRPMRVVGWYHSHPHITVWPS | | GRPMRVVGWYHSHPHITVWP |
| | | HVDVRTQAMYQMMDQGFVGLIF | | SHVDVRTQAMYQMMDQGFVG |
| | | SCFIEDKNTKTGRVLYTCFQSI | | LIFSCFIEDKNTKTGRVLYT |
| | | QAQKSSESLHGPRDFWSSSQHI | | CFQSIQAQKSSESLHGPRDF |
| | | SIEGQKEEERYERIEIPIHIVP | | WSSSQHISIEGQKEEERYER |
| | | HVTIGKVCLESAVELPKILCQE | | IEIPIHIVPHVTIGKVCLES |
| | | EQDAYRRIHSLTHLDSVIKIHN | | AVELPKILCQEEQDAYRRIH |
| | | GSVFTKNLCSQMSAVSGPLLQW | | SLTHLDSVIKIHNGSVFTKN |
| | | LEDRLEQNQQHLQELQQEKEEL | | LCSQMSAVSGPLLQWLEDRL |
| | | MQELSSLE | | EQNQQHLQELQQEKEELMQE |
| | | | | LSSLE |

### 5.3.2 Targeting Domain

[0150] In some embodiments, the targeting domain comprises a targeting moiety that specifically binds to a target mitochondrial protein. In some embodiments, the targeting moiety comprises an antibody (or antigen binding fragment thereof). In some embodiments, the antibody is a full-length antibody, a single chain variable fragment (scFv), a (scFv)₂, a scFv-Fc, a Fab, a Fab′, a (Fab′)₂, a F(v), a single domain antibody, a single chain antibody, a VHH, or a (VHH)₂. In some embodiments the targeting moiety comprises a VHH. In some embodiments the targeting moiety comprises a (VHH)₂.

[0151] In some embodiments, the targeting moiety specifically binds to a wild type target mitochondrial protein. In some embodiments, the targeting moiety specifically binds to a wild type target mitochondrial protein, but does not specifically binds to a variant of the target mitochondrial protein associated with a genetic disease. In some embodiments, the targeting moiety specifically binds to a naturally occurring variant of a target mitochondrial protein. In some embodiments, the targeting moiety specifically binds to a naturally occurring variant of a target mitochondrial protein that is associated with a genetic disease (e.g., a genetic disease described herein). In some embodiments, the targeting moiety specifically binds to a naturally occurring variant of a target mitochondrial protein that is a cause of a genetic disease (e.g., a genetic disease described herein). In some embodiments, the targeting moiety specifically binds a naturally occurring variant of a target mitochondrial protein that is a loss of a function variant. In some embodiments, the targeting moiety specifically binds a naturally occurring variant of a target mitochondrial protein that is a loss of a function variant associated with a genetic disease (e.g., a genetic disease described herein). In some embodiments, the targeting moiety specifically binds a naturally occurring variant of a target mitochondrial protein that is a loss of a function variant that causes a genetic disease (e.g., a genetic disease described herein).

### 5.3.2.1 Exemplary Target Mitochondrial Proteins

[0152] In some embodiments, targeting moiety specifically binds a target mitochondrial protein (e.g., a mitochondrial protein described herein). Exemplary target mitochondrial proteins include, but are not limited to, dynamin-like 120 kDa protein (OPA1), protoporphyrinogen oxidase (PPOX), frataxin (FXN), DNA polymerase subunit gamma-1 (POLG), cytochrome c oxidase subunit 6A2, mitochondrial (COX6A2), ubiquinol-cytochrome-c reductase complex assembly factor 2 (UQCC2), and complex III assembly factor LYRM7 (LYRM7). In some embodiments, the target mitochondrial protein is OPA1. In some embodiments, the target mitochondrial protein is PPOX. In some embodiments, the target mitochondrial protein is FXN. In some embodiments, the target mitochondrial protein is POLG. In some embodiments, the target mitochondrial protein is cytochrome c oxidase subunit 6A2 mitochondrial (COX6A2). In some embodiments, the target mitochondrial protein is ubiquinol-cytochrome-c reductase complex assembly factor 2 (UQCC2). In some embodiments, the target mitochondrial protein is complex III assembly factor LYRM7 (LYRM7).

[0153] In some embodiments, the target mitochondrial protein comprises an amino acid sequence at least 90%, 91%, 92%, 93%, 94%, 95%, 96%, 97%, 98%, 99%, or 100% identical to the amino acid sequence of SEQ ID NO: 221. In some embodiments, the target mitochondrial protein comprises an amino acid sequence at least 90%, 91%, 92%, 93%, 94%, 95%, 96%, 97%, 98%, 99%, or 100% identical to the amino acid sequence of SEQ ID NO: 222. In some embodiments, the target mitochondrial protein comprises an amino acid sequence at least 90%, 91%, 92%, 93%, 94%, 95%, 96%, 97%, 98%, 99%, or 100% identical to the amino acid sequence of SEQ ID NO: 223. In some embodiments, the target mitochondrial protein comprises an amino acid sequence at least 90%, 91%, 92%, 93%, 94%, 95%, 96%, 97%, 98%, 99%, or 100% identical to the amino acid sequence of SEQ ID NO: 224. In some embodiments, the target mitochondrial protein comprises an amino acid sequence at least 90%, 91%, 92%, 93%, 94%, 95%, 96%, 97%, 98%, 99%, or 100% identical to the amino acid sequence of SEQ ID NO: 271. In some embodiments, the target mitochondrial protein comprises an amino acid sequence at least 90%, 91%, 92%, 93%, 94%, 95%, 96%, 97%, 98%, 99%, or 100% identical to the amino acid sequence of SEQ ID NO: 272. In some embodiments, the target mitochondrial protein comprises an amino acid sequence at least 90%, 91%, 92%, 93%, 94%, 95%, 96%, 97%, 98%, 99%, or 100% identical to the amino acid sequence of SEQ ID NO: 273.

[0154] Table 2 below, provides the wild type amino acid sequence of exemplary proteins to target for deubiquitination utilizing the fusion proteins described herein.

TABLE 2
The amino acid sequence of exemplary mitochondrial proteins to
target for deubiquitination utilizing the fusion proteins described
herein and exemplary disease associations

| | Disease | SEQ ID | |
|---|---|---|---|
| Description | Associations | NO | WT Amino Acid Sequence |
| Dynamin-like | Optic atrophy 1 | 221 | MWRLRRAAVACEVCQSLVKHSSGIKGSLPLQKLHL |
| 120 kDa | | | VSRSIYHSHHPTLKLQRPQLRTSFQQFSSLTNLPL |
| protein (OPA1) | | | RKLKFSPIKYGYQPRRNFWPARLATRLLKLRYLIL |
| Signal | | | GSAVGGGYTAKKTFDQWKDMIPDLSEYKWIVPDIV |
| Sequence | | | WEIDEYIDFEKIRKALPSSEDLVKLAPDEDKIVES |
| Underlined | | | LSLLKDFFTSGSPEETAFRATDRGSESDKHERKVS |
| | | | DKEKIDQLQEELLHTQLKYQRILERLEKENKELRK |
| | | | LVLQKDDKGIHHRKLKKSLIDMYSEVLDVLSDYDA |
| | | | SYNTQDHLPRVVVVGDQSAGKTSVLEMIAQARIFP |
| | | | RGSGEMMTRSPVKVTLSEGPHHVALFKDSSREFDL |
| | | | TKEEDLAALRHEIELRMRKNVKEGCTVSPETISLN |
| | | | VKGPGLQRMVLVDLPGVINTVTSGMAPDTKETIFS |
| | | | ISKAYMQNPNAIILCIQDGSVDAERSIVTDLVSQM |
| | | | DPHGRRTIFVLTKVDLAEKNVASPSRIQQIIEGKL |
| | | | FPMKALGYFAVVTGKGNSSESIEAIREYEEEFFQN |
| | | | SKLLKTSMLKAHQVTTRNLSLAVSDCFWKMVRESV |
| | | | EQQADSFKATRENLETEWKNNYPRLRELDRNELFE |
| | | | KAKNEILDEVISLSQVTPKHWEEILQQSLWERVST |
| | | | HVIENIYLPAAQTMNSGTENTTVDIKLKQWTDKQL |
| | | | PNKAVEVAWETLQEEFSREMTEPKGKEHDDIEDKL |
| | | | KEAVKEESIKRHKWNDFAEDSLRVIQHNALEDRSI |
| | | | SDKQQWDAAIYEMEEALQARLKDTENAIENMVGPD |
| | | | WKKRWLYWKNRTQEQCVHNETKNELEKMLKCNEEH |
| | | | PAYLASDEITTVRKNLESRGVEVDPSLIKDTWHQV |
| | | | YRRHFLKTALNHCNLCRRGFYYYQRHFVDSELECN |
| | | | DVVLFWRIQRMLAITANTLRQQLTNTEVRRLEKNV |
| | | | KEVLEDFAEDGEKKIKLLTGKRVQLAEDLKKVREI |
| | | | QEKLDAFIEALHQEK |
| Protoporphy- | Porphyria | 222 | MGRTVVVLGGGISGLAASYHLSRAPCPPKVVLVES |
| rinogen oxidase | variegata | | SERLGGWIRSVRGPNGAIFELGPRGIRPAGALGAR |
| (PPOX) | | | TLLLVSELGLDSEVLPVRGDHPAAQNRFLYVGGAL |
| | | | HALPTGLRGLLRPSPPFSKPLFWAGLRELTKPRGK |
| | | | EPDETVHSFAQRRLGPEVASLAMDSLCRGVFAGNS |
| | | | RELSIRSCFPSLFQAEQTHRSILLGLLLGAGRTPQ |
| | | | PDSALIRQALAERWSQWSLRGGLEMLPQALETHLT |
| | | | SRGVSVLRGQPVCGLSLQAEGRWKVSLRDSSLEAD |
| | | | HVISAIPASVLSELLPAEAAPLARALSAITAVSVA |
| | | | VVNLQYQGAHLPVQGFGHLVPSSEDPGVLGIVYDS |
| | | | VAFPEQDGSPPGLRVTVMLGGSWLQTLEASGCVLS |
| | | | QELFQQRAQEAAATQLGLKEMPSHCLVHLHKNCIP |
| | | | QYTLGHWQKLESARQFLTAHRLPLTLAGASYEGVA |
| | | | VNDCIESGRQAAVSVLGTEPNS |
| Frataxin | Friedreic's | 223 | MWTLGRRAVAGLLASPSPAQAQTLTRVPRPAELAP |
| (FXN) | Ataxia | | LCGRRGLRTDIDATCTPRRASSNQRGLNQIWNVKK |
| | | | QSVYLMNLRKSGTLGHPGSLDETTYERLAEETLDS |
| | | | LAEFFEDLADKPYTFEDYDVSFGSGVLTVKLGGDL |
| | | | GTYVINKQTPNKQIWLSSPSSGPKRYDWTGKNWVY |
| | | | SHDGVSLHELLAAELTKALKTKLDLSSLAYSGKDA |
| DNA | Alpers | 224 | MSRLLWRKVAGATVGPGPVPAPGRWVSSSVPASDP |
| polymerase | Syndrome | | SDGQRRRQQQQQQQQQQQQQPQQPQVLSSEGGQLR |
| subunit | | | HNPLDIQMLSRGLHEQIFGQGGEMPGEAAVRRSVE |
| gamma-1 | | | HLQKHGLWGQPAVPLPDVELRLPPLYGDNLDQHER |
| (POLG) | | | LLAQKQSLPYLEAANLLLQAQLPPKPPAWAWAEGW |
| | | | TRYGPEGEAVPVAIPEERALVEDVEVCLAEGTCPT |
| | | | LAVAISPSAWYSWCSQRLVEERYSWTSQLSPADLI |
| | | | PLEVPTGASSPTQRDWQEQLVVGHNVSEDRAHIRE |
| | | | QYLIQGSRMRFLDTMSMHMAISGLSSFQRSLWIAA |
| | | | KOGKHKVQPPTKQGQKSQRKARRGPAISSWDWLDI |
| | | | SSVNSLAEVHRLYVGGPPLEKEPRELFVKGTMKDI |
| | | | RENFQDLMQYCAQDVWATHEVFQQQLPLFLERCPH |
| | | | PVTLAGMLEMGVSYLPVNQNWERYLAEAQGTYEEL |
| | | | QREMKKSLMDLANDACQLLSGERYKEDPWLWDLEW |
| | | | DLQEFKQKKAKKVKKEPATASKLPIEGAGAPGDPM |
| | | | DQEDLGPCSEEEEFQQDVMARACLQKLKGTTELLP |
| | | | KRPQHLPGHPGWYRKLCPRLDDPAWTPGPSLLSLQ |
| | | | MRVTPKLMALTWDGEPLHYSERHGWGYLVPGRRDN |
| | | | LAKLPTGTTLESAGVVCPYRAIESLYRKHCLEQGK |
| | | | QQLMPQEAGLAEEFLLTDNSAIWQTVEELDYLEVE |
| | | | AEAKMENLRAAVPGQPLALTARGGPKDTQPSYHHG |
| | | | NGPYNDVDIPGCWFFKLPHKDGNSCNVGSPFAKDE |
| | | | LPKMEDGTLQAGPGGASGPRALEINKMISFWRNAH |
| | | | KRISSQMVVWLPRSALPRAVIRHPDYDEEGLYGAI |
| | | | LPQVVTAGTITRRAVEPTWLTASNARPDRVGSELK |
| | | | AMVQAPPGYTLVGADVDSQELWIAAVLGDAHFAGM |
| | | | HGCTAFGWMTLQGRKSRGTDLHSKTATTVGISREH |
| | | | AKIFNYGRIYGAGQPFAERLLMQFNHRLTQQEAAE |
| | | | KAQQMYAATKGLRWYRLSDEGEWLVRELNLPVDRT |
| | | | EGGWISLQDLRKVQRETARKSQWKKWEVVAERAWK |
| | | | GGTESEMENKLESIATSDIPRTPVLGCCISRALEP |
| | | | SAVQEEFMTSRVNWVVQSSAVDYLHLMLVAMKWLF |
| | | | EEFAIDGRFCISIHDEVRYLVREEDRYRAALALQI |
| | | | TNLLTRCMFAYKLGLNDLPQSVAFFSAVDIDRCLR |
| | | | KEVTMDCKTPSNPTGMERRYGIPQGEALDIYQIIE |
| | | | LTKGSLEKRSQPGP |
| Cytochrome c | Mitochondrial | 271 | MALPLRPLTRGLASAAKGGHGGAGARTWRLLTFVL |
| oxidase | complex IV | | ALPSVALCTENSYLHSGHRPRPEFRPYQHLRIRTK |
| subunit 6A2, | deficiency, | | PYPWGDGNHTLFHNSHVNPLPTGYEHP |
| mitochondrial | nuclear type 18 | | |
| (COX6A2) | (MC4DN18) | | |
| Signal | | | |
| sequence | | | |
| underlined | | | |
| Ubiquinol- | Mitochondrial | 272 | MAASRYRRFLKLCEEWPVDETKRGRDLGAYLRQRV |
| cytochrome-c | complex III | | AQAFREGENTQVAEPEACDQMYESLARLHSNYYKH |
| reductase | deficiency, | | KYPRPRDTSFSGLSLEEYKLILSTDTLEELKEIDK |
| complex | nuclear 7 | | GMWKKLQEKFAPKGPEEDHKA |
| assembly | (MC3DN7) | | |
| factor 2 | | | |
| (UQCC2) | | | |
| Signal | | | |
| sequence | | | |
| underlined | | | |
| Complex III | Mitochondrial | 273 | MGRAVKVLQLFKTLHRTRQQVEKNDARALEAARIK |
| assembly factor | complex III | | INEEFKNNKSETSSKKIEELMKIGSDVELLLRTSV |
| LYRM7 | deficiency, | | IQGIHTDHNTLKLVPRKDLLVENVPYCDAPTOKQ |
| (LYRM7) | nuclear 8 | | |
| | (MC3DN8) | | |

### 5.3.3 Mitochondrial Localization Signals

[0155] In some embodiments, the fusion protein comprises a mitochondrial localization signal (MLS) at the N terminus of the fusion protein. Exemplary MLSs are provided in Table 3. In some embodiments, the MLS comprises an amino acid sequence at least 95%, 96%, 97%, 98%, 99%, or 100% identical to one of SEQ ID NO: 275-278.

TABLE 3
The amino acid sequence of exemplary MLSs

| | SEQ |
|---|---|
| | ID |
| Amino Acid Sequence | NO |
| MWRLRRAAVACEVCQSLVKHSSGIKGSLPLQKLHLVSRSIYHSH | 275 |
| HPTLKLQRPQLRTSFQQFSSLTNLPLRKLKFSPIKYGYQPRRN | |
| MWTLGRRAVAGLLASPSPAQAQTLTRVPRPAELAPLCGRRG | 276 |
| MALPLRPLTRGLA | 277 |
| MAASRYRRELKLC | 278 |

### 5.3.4 Orientation and Linkers

[0156] In some embodiments, the effector domain is N-terminal of the targeting domain in the fusion protein. In some embodiments, the targeting domain is N-terminal of the effector domain in the fusion protein. In some embodiments, the effector domain is operably connected (directly or indirectly) to the C terminus of the targeting domain. In some embodiments, the effector domain is operably connected (directly or indirectly) to the N terminus of the targeting domain. In some embodiments, the effector domain is directly operably connected to the C terminus of the targeting domain. In some embodiments, the effector domain is directly operably connected to the N terminus of the targeting domain.

[0157] In some embodiments, the effector domain is indirectly operably connected to the C terminus of the targeting domain. In some embodiments, the effector domain is indirectly operably connected to the N terminus of the targeting domain. One or more amino acid sequences comprising e.g., a linker, or encoding one or more polypeptides may be positioned between the effector moiety and the targeting moiety. In some embodiments, the effector domain is indirectly operably connected to the C terminus of the targeting domain through a peptide linker. In some embodiments, the effector domain is indirectly operably connected to the N terminus of the targeting domain through a peptide linker.

[0158] Each component of the fusion protein described herein can be directly linked to the other to indirectly linked to the other via a peptide linker. [0080] Any suitable peptide linker known in the art can be used that enables the effector domain and the targeting domain to bind their respective antigens. In some embodiments, the linker is one or any combination of a cleavable linker, a non-cleavable linker, a peptide linker, a flexible linker, a rigid linker, a helical linker, or a non-helical linker. In some embodiments, the linker is a peptide linker. In some embodiments, the linker is a peptide linker that comprises glycine or serine, or both glycine and serine amino acid residues. In some embodiments, the peptide linker comprises from about 1-20, 1-15, 1-10, 1-5, 5-20, 5-15, 5-10, or 15-20 amino acids. In some embodiments, the peptide linker comprises from or from about 2-25, 5-25, 10-25, 15-25, 20-25, 2-20, 5-20, 10-20, 15-20, 2-15, 5-15, 10-15, 2-10, or 5-10 amino acids. In some embodiments, the linker is a peptide linker that consists of glycine or serine, or both glycine and serine amino acid residues. In some embodiments, the peptide linker consists of from or from about 2-25, 5-25, 10-25, 15-25, 20-25, 2-20, 5-20, 10-20, 15-20, 2-15, 5-15, 10-15, 2-10, or 5-10 amino acids. In some embodiments, the peptide linker comprises at least 2, 3, 4, 5, 6, 7, 8, 9, 10, 11, 12, 13, 14, 15, 16, 17, 18, 19, 20, 21, 22, 23, 24, 25, 26, 27, 28, 29, or 30 amino acid residues. In some embodiments, the linker is at least 11 amino acids in length. In some embodiments, the linker is at least 15 amino acids in length. In some embodiments, the linker is 10, 11, 12, 13, 14, 15, 16, 17, 18, 19, 20, 21, 22, 23, 24, 25, 26, 27, 28, 29, or 30 amino acid residues in length.

[0159] In some embodiments, the linker is a glycine/serine linker, e.g., a peptide linker substantially consisting of the amino acids glycine and serine. In some embodiments, the linker is a glycine/serine/proline linker, e.g., a peptide linker substantially consisting of the amino acids glycine, serine, and proline.

[0160] In some embodiments, the amino acid sequence of the linker comprises the amino acid sequence of any one of SEQ ID NOS: 297-406, or the amino acid sequence of any one of SEQ ID NOS: 279-406 comprising 1, 2, or 3 amino acid modifications (e.g., a substitution, deletion, or addition). In some embodiments, the amino acid sequence of the linker consists of the amino acid sequence of any one of SEQ ID NOS: 297-406, or the amino acid sequence of any one of SEQ ID NOS: 297-406 comprising 1, 2, or 3 amino acid modifications (e.g., a substitution, deletion, or addition).

[0161] In some embodiments, the amino acid sequence of the linker comprises the amino acid sequence of any one of SEQ ID NOS: 297-288, or the amino acid sequence of any one of SEQ ID NOS: 297-288 comprising 1, 2, or 3 amino acid modifications (e.g., a substitution, deletion, or addition). In some embodiments, the amino acid sequence of the linker consists of the amino acid sequence of any one of SEQ ID NOS: 297-288, or the amino acid sequence of any one of SEQ ID NOS: 297-288 comprising 1, 2, or 3 amino acid modifications (e.g., a substitution, deletion, or addition).

[0162] The amino acid sequence of exemplary linkers for use in any one or more of the fusion proteins described herein is provided in Table 4 below.

TABLE 4
Amino Acid Sequence of Exemplary Linkers

| Amino Acid Sequence | SEQ ID NO |
|---|---|
| GGGGSGGGGSGGGGSGGGGSGGGGS | 279 |
| GGGGSGGGGSGGGGSGGGGS | 280 |
| GGGGSGGGGSGGGGS | 28 |
| GGGGSGGGGS | 282 |
| GGGGS | 283 |
| SGGGGSGGGGSGGGGS | 284 |
| SGGGGSGGGGSGGGG | 285 |
| SGGGGSGGGG | 286 |
| SGGGG | 287 |
| GGSGG | 288 |
| AHFKISGEKRPSTDPGKKAKNPKKKKKKDP | 289 |
| AHRAKKMSKTHA | 290 |
| ASPEYVNLPINGNG | 291 |
| CTKRPRW | 292 |
| DKAKRVSRNKSEKKRR | 293 |
| EELRLKEELLKGIYA | 294 |
| EEQLRRRKNSRLNNTG | 295 |
| EVLKVIRTGKRKKKAWKRMVTKVC | 296 |
| HHHHHHHHHHHHQPH | 297 |
| HKKKHPDASVNESEFSK | 298 |
| HKRTKKNLS | 299 |
| IINGRKLKLKKSRRRSSQTSNNSFTSRRS | 300 |
| KAEQERRK | 301 |
| KEKRKRREELFIEQKKRK | 302 |
| KKGKDEWFSRGKKP | 303 |
| KKGPSVQKRKKTNLS | 304 |
| KKKTVINDLLHYKKEK | 305 |
| KKNGGKGKNKPSAKIKK | 306 |
| KKPKWDDFKKKKK | 307 |
| KKRKKDNLS | 308 |
| KKRRKRRRK | 309 |
| KKRRRRARK | 310 |
| KKSKRGR | 311 |
| KKSRKRGS | 312 |
| KKSTALSRELGKIMRRR | 313 |
| KKSYQDPEIIAHSRPRK | 314 |
| KKTGKNRKLKSKRVKTR | 315 |
| KKVSIAGQSGKLWRWKR | 316 |
| KKYENVVIKRSPRKRGRPRK | 317 |
| KNKKRK | 318 |
| KPKKKR | 319 |
| KRAMKDDSHGNSTSPKRRK | 320 |
| KRANSNLVAAYEKAKKK | 321 |
| KRASEDTTSGSPPKKSSAGPKR | 322 |
| KRFKRRWMVRKMKTKK | 323 |
| KRGLNSSFETSPKKVK | 324 |
| KRGNSSIGPNDLSKRKQRKK | 325 |
| KRIHSVSLSQSQIDPSKKVKRAK | 326 |
| KRKGKLKNKGSKRKK | 327 |
| KRRRRRRREKRKR | 328 |
| KRSNDRTYSPEEEKQRRA | 329 |
| KRTVATNGDASGAHRAKKMSK | 330 |
| KRVYNKGEDEQEHLPKGKKR | 331 |
| KSGKAPRRRAVSMDNSNK | 332 |
| KVNFLDMSLDDIIIYKELE | 333 |
| KVQHRIAKKTTRRRR | 334 |
| LSPSLSPL | 335 |
| MDSLLMNRRKFLYQFKNVRWAKGRRETYLC | 336 |
| MPQNEYIELHRKRYGYRLDYHEKKRKKESREAHERSKK | 337 |
| AKKMIGLKAKLYHK | |
| MVQLRPRASR | 338 |
| NNKLLAKRRKGGASPKDDPMDDIK | 339 |
| NYKRPMDGTYGPPAKRHEGE | 340 |
| PDTKRAKLDSSETTMVKKK | 341 |
| PEKRTKI | 342 |
| PGGRGKKK | 343 |
| PGKMDKGEHRQERRDRPY | 344 |
| PKKGDKYDKTD | 245 |
| PKKKSRK | 246 |
| PKKNKPE | 347 |
| PKKRAKV | 348 |
| PKPKKLKVE | 349 |
| PKRGRGR | 350 |
| PKRRLVDDA | 351 |
| PKRRRTY | 352 |
| PLEKRR | 353 |
| PLRKAKR | 354 |
| PPAKRKCIF | 355 |
| PPARRRRL | 356 |
| PPKKKRKV | 357 |
| PPNKRMKVKH | 358 |
| PPRIYPQLPSAPT | 359 |
| PQRSPFPKSSVKR | 360 |
| PRPRKVPR | 361 |
| PRRRVQRKR | 362 |
| PRRVRLK | 363 |
| PSRKRPR | 364 |
| PSSKKRKV | 365 |
| PTKKRVK | 366 |
| QRPGPYDRP | 367 |
| RGKGGKGLGKGGAKRHRK | 368 |
| RKAGKGGGGHKTTKKRSAKDEKVP | 369 |
| RKIKLKRAK | 370 |
| RKIKRKRAK | 371 |
| RKKEAPGPREELRSRGR | 372 |
| RKKRKGK | 373 |
| RKKRRQRRR | 374 |
| RKKSIPLSIKNLKRKHKRKKNKITR | 375 |
| RKLVKPKNTKMKTKLRTNPY | 376 |
| RKRLILSDKGQLDWKK | 377 |
| RKRLKSK | 378 |
| RKRRVRDNM | 379 |
| RKRSPKDKKEKDLDGAGKRRKT | 380 |
| RKRTPRVDGQTGENDMNKRRRK | 381 |
| RLPVRRRRRR | 382 |
| RLRFRKPKSK | 383 |
| RQQRKR | 384 |
| RRDLNSSFETSPKKVK | 385 |
| RRDRAKLR | 386 |
| RRGDGRRR | 387 |
| RRGRKRKAEKQ | 388 |
| RRKKRR | 389 |
| RRKRSKSEDMDSVESKRRR | 390 |
| RRKRSR | 391 |
| RRPKGKTLQKRKPK | 392 |
| RRRGFERFGPDNMGRKRK | 393 |
| RRRGKNKVAAQNCRK | 394 |
| RRRKRRNLS | 395 |
| RRRQKQKGGASRRR | 396 |
| RRRREGPRARRRR | 397 |
| RRTIRLKLVYDKCDRSCKIQKKNRNKCQYCRFHKCLSV | 398 |
| GMSHNAIRFGRMPRSEKAKLKAE | |
| RRVPQRKEVSRCRKCRK | 399 |
| RVGGRRQAVECIEDLLNEPGQPLDLSCKRPRP | 400 |
| RVVKLRIAP | 401 |
| RVVRRR | 402 |
| SKRKTKISRKTR | 403 |
| SYVKTVPNRTRTYIKL | 404 |
| TGKNEAKKRKIA | 405 |
| TLSPASSPSSVSCPVIPASTDESPGSALNI | 406 |

### 5.3.4.1 Conditional Constructs

[0163] Also described herein are constructs that comprise a targeting domain (e.g., a VHH, (VHH)₂) bound to an effector domain (e.g., an effector domain that comprises a catalytic domain of an deubiquitinase, or an effector domain that comprises a deubiquitinase). In some embodiments, the association of the targeting domain and the effector domain is mediated by binding of a first agent (e.g., a small molecule, protein, or peptide) attached to the targeting domain and a second agent (e.g., a small, molecule, protein, or peptide) attached to the effector domain. For example, in one embodiment, the targeting domain may be attached to a first agent that specifically binds to a second agent that is attached to the effector domain. In some embodiments, specific binding of the first agent to the second agent is mediated by addition of a third agent (e.g., a small molecule).

[0164] For example, a conditional construct includes an KBP/FRB-based dimerization switch, e.g., as described in US20170081411 (the entire contents of which are incorporated by reference herein), can be utilized herein. FKBP12 (FKBP or FK506 binding protein) is an abundant cytoplasmic protein that serves as the initial intracellular target for the natural product immunosuppressive drug, rapamycin. Rapamycin binds to FKBP and to the large PI3K homolog FRAP (RAFT, mTOR), thereby acting to dimerize these molecules. In some embodiments, an FKBP/FRAP based switch, also referred to herein as an FKBP/FRB based switch, can utilize a heterodimerization molecule, e.g., rapamycin or a rapamycin analog. FRB is a 93 amino acid portion of FRAP, that is sufficient for binding the FKBP-rapamycin complex (Chen, J., Zheng, X. F., Brown, E. J. & Schreiber, S. L. (1995) Identification of an 11-kDa FKBP12-rapamycin-binding domain within the 289-kDa FKBP12-rapamycin-associated protein and characterization of a critical serine residue. Proc Natl Acad Sci USA 92: 4947-51), the entire contents of which is incorporated by reference herein. For example, the targeting domain can be attached to FKBP and the effector domain attached to FRB. Thereby, the association of the targeting domain and the effector domain is mediated by rapamycin and only takes place in the presence of rapamycin.

[0165] Exemplary conditional activation systems that can be used here include, but are not limited to those described in US20170081411; Lajoie M J, et al. Designed protein logic to target cells with precise combinations of surface antigens. Science. 2020 Sep. 25; 369(6511):1637-1643. doi: 10.1126/science.aba6527. Epub 2020 Aug. 20. PMID: 32820060; Farrants H, et al. Chemogenetic Control of Nanobodies. Nat Methods. 2020 March; 17(3):279-282. doi: 10.1038/s41592-020-0746-7. Epub 2020 Feb. 17. PMID: 32066961; and US20170081411, the entire contents of each of which is incorporated by reference herein for all purposes.

### 5.3.5 Exemplary Fusion Proteins

[0166] Exemplary fusion proteins of the present disclosure include, but are not limited to, those described below. In one embodiment, the fusion protein comprises an effector domain comprising a catalytic domain of a cysteine protease deubiquitinase, or a functional fragment or functional variant thereof; and a targeting domain comprising a targeting moiety that specifically binds a mitochondrial protein, wherein the mitochondrial protein is OPA1, PPOX, FXN, POLG, COX6A2, UQCC2, or LYRM7.

[0167] In one embodiment, the fusion protein comprises an effector domain comprising a catalytic domain of a metalloprotease deubiquitinase, or a functional fragment or functional variant thereof; and a targeting domain comprising a targeting moiety that specifically binds a mitochondrial protein, wherein the mitochondrial protein is OPA1, PPOX, FXN, POLG, COX6A2, UQCC2, or LYRM7.

[0168] In one embodiment, the fusion protein comprises an effector domain comprising a catalytic domain of a deubiquitinase, or a functional fragment or functional variant thereof, wherein the deubiquitinase is a ubiquitin-specific protease (USP), a ubiquitin C-terminal hydrolase (UCH), a Machado-Josephin domain protease (MJD), an ovarian tumour protease (OTU), a MINDY protease, or a ZUFSP protease; and a targeting domain comprising a targeting moiety that specifically binds a mitochondrial protein, wherein the mitochondrial protein is OPA1, PPOX, FXN, POLG, COX6A2, UQCC2, or LYRM7.

[0169] In one embodiment, the fusion protein comprises an effector domain comprising a catalytic domain of a deubiquitinase, or a functional fragment or functional variant thereof, wherein the deubiquitinase is selected from the group consisting of USP1, USP2, USP3, USP4, USP5, USP6, USP7, USP8, USP9X, USP9Y, USP10, USP11, USP12, USP13, USP14, USP15, USP16, USP17, USP17L2, USP17L3, USP17L4, USP17L5, USP17L7, USP17L8, USP18, USP19, USP20, USP21, USP22, USP23, USP24, USP25, USP26, USP27X, USP28, USP29, USP30, USP31, USP32, USP33, USP34, USP35, USP36, USP37, USP38, USP39, USP40, USP41, USP42, USP43, USP44, USP45, USP46, BAP1, UCHL1, UCHL3, UCHL5, ATXN3 ATXN3L, OTUB1, OTUB2 MINDY1, MINDY2, MINDY3, MINDY4, or ZUP1; and a targeting domain comprising a targeting moiety that specifically binds a mitochondrial protein, wherein the mitochondrial protein is OPA1, PPOX, FXN, POLG, COX6A2, UQCC2, or LYRM7.

[0170] In one embodiment, the fusion protein comprises an effector domain comprising a catalytic domain of a deubiquitinase, or a functional fragment or functional variant thereof, wherein the deubiquitinase is described in Table 1; and a targeting domain comprising a targeting moiety that specifically binds a mitochondrial protein, wherein the mitochondrial protein is OPA1, PPOX, FXN, POLG, COX6A2, UQCC2, os LYRM7.

[0171] In one embodiment, the fusion protein comprises an effector domain comprising a catalytic domain of a deubiquitinase, or a functional fragment or functional variant thereof, wherein the catalytic domain is described in Table 1; and a targeting domain comprising a targeting moiety that specifically binds a mitochondrial protein, wherein the mitochondrial protein is OPA1, PPOX, FXN, POLG, COX6A2, UQCC2, or LYRM7.

[0172] In one embodiment, the fusion protein comprises an effector domain comprising a catalytic domain of a deubiquitinase, or a functional fragment or functional variant thereof, wherein the deubiquitinase comprises an amino acid sequence at least 80%, 81%, 82%, 83%, 84%, 85%, 86%, 87%, 88%, 89%, 90%, 91%, 92%, 93%, 94%, 95%, 96%, 97%, 98%, 99%, or 100% identical to any one of SEQ ID NOS: 1-112; and a targeting domain comprising a targeting moiety that specifically binds a mitochondrial protein, wherein the mitochondrial protein is OPA1, PPOX, FXN, POLG, COX6A2, UQCC2, or LYRM7.

[0173] In one embodiment, the fusion protein comprises an effector domain comprising a catalytic domain of a deubiquitinase, or a functional fragment or functional variant thereof, wherein the catalytic domain comprises an amino acid sequence at least 80%, 81%, 82%, 83%, 84%, 85%, 86%, 87%, 88%, 89%, 90%, 91%, 92%, 93%, 94%, 95%, 96%, 97%, 98%, 99%, or 100% identical to any one of SEQ ID NOS: 113-220 or 270; and a targeting domain comprising a targeting moiety that specifically binds a mitochondrial protein, wherein the mitochondrial protein is OPA1, PPOX, FXN, POLG, COX6A2, UQCC2, or LYRM7.

[0174] In one embodiment, the fusion protein comprises an effector domain comprising a catalytic domain of a deubiquitinase, or a functional fragment or functional variant thereof, wherein the deubiquitinase comprises an amino acid sequence at least 80%, 81%, 82%, 83%, 84%, 85%, 86%, 87%, 88%, 89%, 90%, 91%, 92%, 93%, 94%, 95%, 96%, 97%, 98%, 99%, or 100% identical to any one of SEQ ID NOS: 1-112; and a targeting domain comprising a targeting moiety that specifically binds a mitochondrial protein, wherein the mitochondrial protein comprises an amino acid sequence at least 90%, 91%, 92%, 93%, 94%, 95%, 96%, 97%, 98%, 99%, or 100% identical to any one of SEQ ID NOS: 221-224 or 271-273.

[0175] In one embodiment, the fusion protein comprises an effector domain comprising a catalytic domain of a deubiquitinase, or a functional fragment or functional variant thereof, wherein the catalytic domain comprises an amino acid sequence at least 80%, 81%, 82%, 83%, 84%, 85%, 86%, 87%, 88%, 89%, 90%, 91%, 92%, 93%, 94%, 95%, 96%, 97%, 98%, 99%, or 100% identical to any one of SEQ ID NOS: 113-220 or 270; and a targeting domain comprising a targeting moiety that specifically binds a mitochondrial protein, wherein the mitochondrial protein comprises an amino acid sequence at least 90%, 91%, 92%, 93%, 94%, 95%, 96%, 97%, 98%, 99%, or 100% identical to any one of SEQ ID NOS: 221-224 or 271-273.

### 5.3.5.1 Additional Exemplary Embodiments

[0176] Additional exemplary embodiments of fusion proteins described herein are provided below, which should not be construed as limiting.
[0177] Embodiment 1. A fusion protein comprising: (a) an effector moiety comprising a functional fragment of a human deubiquitinase that is capable of mediating deubiquitination, wherein the human deubiquitinase comprises an amino acid sequence at least 80%, 81%, 82%, 83%, 84%, 85%, 86%, 87%, 88%, 89%, 90%, 95%, 96%, 97%, 98%, 99%, or 100% identical to the amino acid sequence of any one of SEQ ID NOS: 1-112, and a targeting moiety comprising a VHH, (VHH)₂. or scFv that specifically binds to a mitochondrial protein.
[0178] Embodiment 2. A fusion protein comprising an effector moiety comprising a functional fragment of a human deubiquitinase that is capable of mediating deubiquitination that comprises an amino acid sequence at least 80%, 81%, 82%, 83%, 84%, 85%, 86%, 87%, 88%, 89%, 90%, 95%, 96%, 97%, 98%, 99%, or 100% identical to the amino acid sequence of any one of SEQ ID NOS: 113-220 or 270, and a targeting moiety comprising a VHH, (VHH)₂, or scFv that specifically binds to a mitochondrial protein.
[0179] Embodiment 3. A fusion protein comprising an effector moiety comprising a functional fragment of a human deubiquitinase that is capable of mediating deubiquitination that comprises an amino acid sequence at least 80%, 81%, 82%, 83%, 84%, 85%, 86%, 87%, 88%, 89%, 90%, 95%, 96%, 97%, 98%, 99%, or 100% identical to the amino acid sequence of SEQ ID NO: 270, and a targeting moiety comprising a VHH, (VHH)₂, or scFv that specifically binds to a mitochondrial protein.
[0180] Embodiment 4. The fusion protein of any one of Embodiments 1-3, wherein said targeting moiety is a VHH or (VHH)₂.
[0181] Embodiment 5. The fusion protein of any one of Embodiments 1-4, wherein the mitochondrial protein is OPA1, PPOX, FXN, POLG, COX6A2, UQCC2, and LYRM7.
[0182] Embodiment 6. The fusion protein of any one of Embodiments 1-5, wherein said mitochondrial protein is OPA1, PPOX, FXN, or POLG.
[0183] Embodiment 7. The fusion protein of any one of Embodiments 1-6, wherein said mitochondrial protein is COX6A2, UQCC2, or LYRM7.

### 5.3.6 Methods of Making Fusion Proteins

[0184] Fusion proteins described herein can be made by any conventional technique known in the art, for example, recombinant techniques or chemical synthesis (e.g., solid phase peptide synthesis). In some embodiments, the fusion protein is made through recombinant expression in a cell (e.g., a eukaryotic cell, e.g., a mammalian cell). Briefly, the fusion protein can be made by synthesizing the DNA encoding the fusion protein and cloning the DNA into any suitable expression vector. Numerous cloning vectors are known to those of skill in the art, and the selection of an appropriate cloning vector is a matter of choice. The gene can be placed under the control of a promoter, ribosome binding site (for bacterial expression) and, optionally, an operator and/or one or more enhancer elements, so that the DNA sequence encoding the fusion protein is transcribed into RNA in the host cell transformed by a vector containing this expression construction. The coding sequence may or may not contain a signal peptide or leader sequence. Heterologous leader sequences can be added to the coding sequence that causes the secretion of the expressed polypeptide from the host organism. Other regulatory sequences may also be desirable which allow for regulation of expression of the protein sequences relative to the growth of the host cell. Such regulatory sequences are known to those of skill in the art, and examples include those which cause the expression of a gene to be turned on or off in response to a chemical or physical stimulus, including the presence of a regulatory compound. Other types of regulatory elements may also be present in the vector, for example, enhancer sequences. The control sequences and other regulatory sequences may be ligated to the coding sequence prior to insertion into a vector, such as the cloning vectors described above. Alternatively, the coding sequence can be cloned directly into an expression vector which already contains the control sequences and an appropriate restriction site.

[0185] The expression vector may then be used to transform an appropriate host cell. A number of mammalian cell lines are known in the art and include immortalized cell lines available from the American Type Culture Collection (ATCC), such as, but not limited to, Chinese hamster ovary (CHO) cells, CHO-suspension cells (CHO-S), HeLa cells, HEK293, baby hamster kidney (BHK) cells, monkey kidney cells (COS), VERO, HepG2, MadinDarby bovine kidney (MDBK) cells, NOS, U2OS, A549, HT1080, CAD, P19, NIH3T3, L929, N2a, MCF-7, Y79, SO-Rb50, DUKX-X11, and J558L.

[0186] Depending on the expression system and host selected, the fusion protein is produced by growing host cells transformed by an expression vector described above under conditions whereby the fusion protein is expressed. The fusion protein is then isolated from the host cells and purified. If the expression system secretes the fusion protein into growth media, the fusion protein can be purified directly from the media. If the fusion protein is not secreted, it is isolated from cell lysates. The selection of the appropriate growth conditions and recovery methods are within the skill of the art. Once purified, the amino acid sequences of the fusion proteins can be determined, i.e., by repetitive cycles of Edman degradation, followed by amino acid analysis by HPLC. Other methods of amino acid sequencing are also known in the art. Once purified, the functionality of the fusion protein can be assessed, e.g., as described herein, e.g., utilizing a bifunctional ELISA.

[0187] As described above, functionality of the fusion protein can be tested by any method known in the art. Each functionality can be measured in a separate assay. For example, binding of the targeting domain to the target protein can be measure using an enzyme linked immunosorbent assay (ELISA). Catalytic activity of the effector domain can be measured using any standard deubiquitinase activity assay known in the art. For example, BioVision Deubiquitinase Activity Assay Kit (Fluorometric) Catalog #K485-100 according to the manufacturer's instructions. The deubiquitinase activity of a fusion protein described herein can be measured for example by using a fluorescent deubiquitinase substrate to detect deubiquitinase activity upon cleavage of the fluorescent substrate. The deubiquitinase activity can also be measured according to the materials and methods set forth in the Examples provided herein.

### 5.4 Nucleic Acids, Host Cells, Vectors, and Viral Particles

[0188] In one aspect, provided herein are nucleic acid molecules encoding a fusion protein described herein. In some embodiments, the nucleic acid molecule is a DNA molecule. In some embodiments, the nucleic acid molecule is an RNA molecule. In some embodiments, the nucleic acid molecule contains at least one modified nucleic acid (e.g., that increases stability of the nucleic acid molecule), e.g., phosphorothioate, N6-methyladenosine (m6A), N6,2′-O-dimethyladenosine (m6Am), 8-oxo-7,8-dihydroguanosine (8-oxoG), pseudouridine (Ψ), 5-methylcytidine (m5C), and N4-acetylcytidine (ac4C).

[0189] In one aspect, provided herein is a host cell (or population of host cells) comprising a nucleic acid encoding a fusion protein described herein. In some embodiments, the nucleic acid is incorporated into the genome of the host cell. In some embodiments, the nucleic acid is not incorporated into the genome of the host cell. In some embodiments, the nucleic acid is present in the cell episomally. In some embodiments, the host cell is a human cell. In some embodiments, the host cell is a mammalian cell. In some embodiments, the host cell is a mouse, rat, hamster, guinea pig, cat, dog, or human cell. In some embodiments, the host cell is modified in vitro, ex vivo, or in vivo.

[0190] The nucleic acid can be introduced into the host cell by any suitable method known in the art (e.g., as described herein). For example, a viral delivery system (e.g., a retrovirus, an adenovirus, an adeno associated virus, a herpes virus, a lentivirus, a pox virus, a vaccinia virus, a vesicular stomatitis virus, a polio virus, a Newcastle's Disease virus, an Epstein-Barr virus, an influenza virus, a reoviruses, a myxoma virus, a maraba virus, a rhabdovirus, or a coxsackie virus delivery system) can be utilized to deliver a nucleic acid (e.g., DNA or RNA molecule) encoding the fusion protein for expression with the host cell. In some embodiments, the nucleic acid encoding the fusion protein is present episomally within the host cell. In some embodiments, the nucleic acid encoding the fusion protein is incorporated into the genome of the host cell. In some embodiments, the virus replication competent. In some embodiments, the virus is replication deficient.

[0191] In some embodiments, a nucleic acid (DNA or RNA) is delivered to the host cell using a non-viral vector (e.g., a plasmid) encoding the fusion protein. In some embodiments, the nucleic acid encoding the fusion protein is present episomally within the host cell. In some embodiments, the nucleic acid encoding the fusion protein is incorporated into the genome of the host cell. Exemplary non-viral transfection methods known in the art include, but are not limited to, direct delivery of DNA such as by ex vivo transfection, by injection (e.g., microinjection), electroporation, liposome mediated transfection, receptor-mediated transfection, microprojectile bombardment, by agitation with silicon carbide fibers Through the application of techniques such as these cells may be stably or transiently transfected with a nucleic acid encoding a fusion protein described herein to express the encoded fusion protein.

[0192] In one aspect, provided herein are vectors comprising a nucleic acid encoding a fusion protein described herein (e.g., a nucleic acid described herein). In some embodiments, the vector is a viral vector. Exemplary viral vectors include, but are not limited to, retroviral vectors, adenoviral vectors, adeno associated viral vectors, herpes viral vectors, lentiviral vectors, pox viral vectors, vaccinia viral vectors, vesicular stomatitis viral vectors, polio viral vectors, Newcastle's Disease viral vectors, Epstein-Barr viral vectors, influenza viral vectors, reovirus vectors, myxoma viral vectors, maraba viral vectors, rhabdoviral vectors, and coxsackie viral vectors. In some embodiments, the vector is a non-viral vector. In some embodiments, the non-viral vector is a plasmid.

[0193] In one aspect, provided herein is a viral particle (or population of viral particles) that comprise a nucleic acid encoding a fusion protein described herein (e.g., a nucleic acid described herein). In some embodiments, the viral particle is an RNA virus. In some embodiments, the viral particle is a DNA virus. In some embodiments, the viral particle comprises a double stranded genome. In some embodiments, the viral particle comprises a single stranded genome. Exemplary viral particles include, but are not limited to, a retrovirus, an adenovirus, an adeno associated virus, a herpes virus, a lentivirus, a pox virus, a vaccinia virus, a vesicular stomatitis virus, a polio virus, a Newcastle's Disease virus, an Epstein-Barr virus, an influenza virus, a reoviruses, a myxoma virus, a maraba virus, a rhabdovirus, or a coxsackie.

### 5.5 Pharmaceutical Compositions

[0194] In one aspect, provided herein are pharmaceutical compositions comprising 1) a fusion protein described herein, a nucleic acid encoding a fusion protein described herein, a vector comprising a nucleic acid encoding a fusion protein described herein, or a viral particle comprising a nucleic acid encoding a fusion protein described herein; and 2) at least one pharmaceutically acceptable carrier, excipient, stabilizer buffer, diluent, surfactant, preservative and/or adjuvant, etc (see, e.g., Remington's Pharmaceutical Sciences (1990) Mack Publishing Co., Easton, PA). A person of ordinary skill in the art can select suitable excipient for inclusion in the pharmaceutical composition. For example, the formulation of the pharmaceutical composition may differ based on the route of administration (e.g., intravenous, subcutaneous, etc.), and/or the active molecule contained within the pharmaceutical composition (e.g., a viral particle, a non-viral vector, a nucleic acid not contained within a vector).

[0195] Acceptable carriers, excipients, or stabilizers are preferably nontoxic to recipients at the dosages and concentrations employed, and include buffers such as phosphate, citrate, or other organic acids; antioxidants including ascorbic acid or methionine; preservatives (such as octadecyldimethylbenzyl ammonium chloride; hexamethonium chloride; benzalkonium chloride, benzethonium chloride; phenol, butyl or benzyl alcohol; alkyl parabens such as methyl or propyl paraben; catechol; resorcinol; cyclohexanol; 3-pentanol; or m-cresol); low molecular weight (less than about 10 residues) polypeptides; proteins, such as serum albumin, gelatin, or immunoglobulins; hydrophilic polymers such as polyvinylpyrrolidone; amino acids such as glycine, glutamine, asparagine, histidine, arginine, or lysine; monosaccharides, disaccharides, or other carbohydrates including glucose, mannose, or dextrins; chelating agents such as EDTA; sugars such as sucrose, mannitol, trehalose or sorbitol; salt-forming counter-ions such as sodium; metal complexes (e.g., Zn-protein complexes); and/or non-ionic surfactants such as TWEEN™ PLURONICS™ or polyethylene glycol (PEG).

[0196] In one embodiment, the present disclosure provides a pharmaceutical composition comprising a fusion protein described herein for use as a medicament. In another embodiment, the disclosure provides a pharmaceutical composition for use in a method for the treatment of cancer. In some embodiments, pharmaceutical compositions comprise a fusion protein disclosed herein, and optionally one or more additional prophylactic or therapeutic agents, in a pharmaceutically acceptable carrier.

[0197] A pharmaceutical composition may be formulated for any route of administration to a subject. Specific examples of routes of administration include parenteral administration (e.g., intravenous, subcutaneous, intramuscular). In some embodiments, the pharmaceutical composition is formulated for intravenous administration. In some embodiments, the pharmaceutical composition is formulated for subcutaneous administration. Injectables can be prepared in conventional forms, either as liquid solutions or suspensions. The injectables can contain one or more excipients. Exemplary excipients include, for example, water, saline, dextrose, glycerol or ethanol. In addition, if desired, the pharmaceutical compositions to be administered can also contain minor amounts of non-toxic auxiliary substances such as wetting or emulsifying agents, pH buffering agents, stabilizers, solubility enhancers, or other such agents, such as for example, sodium acetate, sorbitan monolaurate, triethanolamine oleate or cyclodextrins.

[0198] In some embodiments, the pharmaceutical composition is formulated for intravenous administration. Suitable carriers for intravenous administration include physiological saline or phosphate buffered saline (PBS), or solutions containing thickening or solubilizing agents, such as glucose, polyethylene glycol, or polypropylene glycol or mixtures thereof.

[0199] The compositions to be used for in vivo administration can be sterile. This is readily accomplished by filtration through, e.g., sterile filtration membranes.

[0200] Pharmaceutically acceptable carriers used in the parenteral preparations described herein include for example, aqueous vehicles, nonaqueous vehicles, antimicrobial agents, isotonic agents, buffers, antioxidants, local anesthetics, suspending and dispersing agents, emulsifying agents, sequestering or chelating agents or other pharmaceutically acceptable substances. Examples of aqueous vehicles, which can be incorporated in one or more of the formulations described herein, include sodium chloride injection, Ringer's injection, isotonic dextrose injection, sterile water injection, dextrose or lactated Ringer's injection. Nonaqueous parenteral vehicles, which can be incorporated in one or more of the formulations described herein, include fixed oils of vegetable origin, cottonseed oil, corn oil, sesame oil or peanut oil. Antimicrobial agents in bacteriostatic or fungistatic concentrations can be added to the parenteral preparations described herein and packaged in multiple-dose containers, which include phenols or cresols, mercurials, benzyl alcohol, chlorobutanol, methyl and propyl p-hydroxybenzoic acid esters, thimerosal, benzalkonium chloride or benzethonium chloride. Isotonic agents, which can be incorporated in one or more of the formulations described herein, include sodium chloride or dextrose. Buffers, which can be incorporated in one or more of the formulations described herein, include phosphate or citrate. Antioxidants, which can be incorporated in one or more of the formulations described herein, include sodium bisulfate. Local anesthetics, which can be incorporated in one or more of the formulations described herein, include procaine hydrochloride. Suspending and dispersing agents, which can be incorporated in one or more of the formulations described herein, include sodium carboxymethylcelluose, hydroxypropyl methylcellulose or polyvinylpyrrolidone. Emulsifying agents, which can be incorporated in one or more of the formulations described herein, include Polysorbate 80 (TWEEN® 80). A sequestering or chelating agent of metal ions, which can be incorporated in one or more of the formulations described herein, is EDTA. Pharmaceutical carriers, which can be incorporated in one or more of the formulations described herein, also include ethyl alcohol, polyethylene glycol or propylene glycol for water miscible vehicles; or sodium hydroxide, hydrochloric acid, citric acid or lactic acid for pH adjustment.

[0201] The precise dose to be employed in a pharmaceutical composition will also depend on the route of administration, and the seriousness of the condition caused by it, and should be decided according to the judgment of the practitioner and each subject's circumstances. For example, effective doses may also vary depending upon means of administration, target site, physiological state of the subject (including age, body weight, and health), other medications administered, or whether therapy is prophylactic or therapeutic. Therapeutic dosages are preferably titrated to optimize safety and efficacy.

### 5.6 Methods of Therapeutic Use

[0202] In one aspect, provided herein are methods of treating a disease in a subject by administering to the subject having the disease a fusion protein described herein, a nucleic acid encoding a fusion protein described herein, a vector comprising a nucleic acid encoding a fusion protein described herein, or a viral particle comprising a nucleic acid encoding a fusion protein described herein.

[0203] The fusion protein can be delivered to host cells via any method known in the art. For example, a viral delivery system (e.g., a retrovirus, an adenovirus, an adeno associated virus, a herpes virus, a lentivirus, a pox virus, a vaccinia virus, a vesicular stomatitis virus, a polio virus, a Newcastle's Disease virus, an Epstein-Barr virus, an influenza virus, a reoviruses, a myxoma virus, a maraba virus, a rhabdovirus, an enadenotucirev or a coxsackie) can be utilized to deliver a nucleic acid (e.g., DNA or RNA molecule) encoding the fusion protein for expression within a population of cells of a subject. In some embodiments, the nucleic acid encoding the fusion protein is present episomally within the population of cells of the subject. In some embodiments, the nucleic acid encoding the fusion protein is incorporated into the genome of the population of cells of the subject. In some embodiments, the virus is replication competent. In some embodiments, the virus is replication deficient.

[0204] In some embodiments, the fusion protein is administered to the subject. In some embodiments, a nucleic acid (DNA or RNA) is administered to the subject. In some embodiments, the nucleic acid (DNA or RNA) is complexed within a carrier (e.g., a nanoparticle, a liposome, a microsphere). In some embodiments, a nucleic acid (DNA or RNA) within a non-viral vector (e.g., a plasmid) encoding the fusion protein is administered to the subject.

### 5.6.1 Administration

[0205] The fusion protein can be delivered to host cells via any method known in the art. For example, a viral delivery system (e.g., a retrovirus, an adenovirus, an adeno associated virus, a herpes virus, a lentivirus, a pox virus, a vaccinia virus, a vesicular stomatitis virus, a polio virus, a Newcastle's Disease virus, an Epstein-Barr virus, an influenza virus, a reoviruses, a myxoma virus, a maraba virus, a rhabdovirus, an enadenotucirev or a coxsackie) can be utilized to deliver a nucleic acid (e.g., DNA or RNA molecule) encoding the fusion protein for expression within a population of cells of a subject. In some embodiments, the nucleic acid encoding the fusion protein is present episomally within the population of cells of the subject. In some embodiments, the nucleic acid encoding the fusion protein is incorporated into the genome of the population of cells of the subject. In some embodiments, the virus is replication competent. In some embodiments, the virus is replication deficient.

[0206] In some embodiments, the fusion protein is administered to the subject. In some embodiments, a nucleic acid (DNA or RNA) is administered to the subject. In some embodiments, the nucleic acid (DNA or RNA) is complexed within a carrier (e.g., a nanoparticle, a liposome, a microsphere). In some embodiments, a nucleic acid (DNA or RNA) within a non-viral vector (e.g., a plasmid) encoding the fusion protein is administered to the subject.

[0207] In some embodiment, the fusion protein is administered parenterally. In some embodiments, the fusion protein is administered via intravenous, intramuscular, intraarterial, intrathecal, intralymphatic, intralesional, intracapsular, intraorbital, intracardiac, intradermal, intraperitoneal, transtracheal, subcutaneous, subcuticular, intraarticular, subcapsular, subarachnoid, intraspinal, epidural or intrasternal injection or infusion. In some embodiments, the fusion protein is intravenously administered. In some embodiments, the fusion protein is subcutaneously administered. In some embodiments, the fusion protein is administered via a non-parenteral route, or orally. Other non-parenteral routes include a topical, epidermal or mucosal route of administration, for example, intranasally, vaginally, rectally, sublingually or topically. Administering can also be performed, for example, once, a plurality of times, and/or over one or more extended periods.

[0208] In some embodiments, the methods disclosed herein are used in place of standard of care therapies. In certain embodiments, a standard of care therapy is used in combination with any method disclosed herein. In some embodiments, the methods disclosed herein are used after standard of care therapy has failed. In some embodiments, the fusion protein is co-administered, administered prior to, or administered after, an additional therapeutic agent. In some embodiments, the disease is a genetic disease.

### 5.6.2 Exemplary Genetic Diseases

[0209] In some embodiments, the disease is a genetic disease. In some embodiments, the genetic disease is associated with decreased expression of a functional target mitochondrial protein. In some embodiments, the genetic disease is associated with decreased stability of a functional target mitochondrial protein. In some embodiments, the genetic disease is associated with increased ubiquitination of a target mitochondrial protein. In some embodiments, the genetic disease is associated with increased ubiquitination and degradation of a target mitochondrial protein. In some embodiments, the genetic disease is a haploinsufficiency disease.

[0210] In some embodiments, the disease is selected from the group consisting of optic atrophy 1, Porphyria variegata, Friedreich's Ataxia, and Alpers Syndrome. In some embodiments, the target mitochondrial protein is OPA1, and the disease is Optic atrophy 1. In some embodiments, the target mitochondrial protein is PPOX, and the disease is Porphyria variegata. In some embodiments, the target mitochondrial protein is FXN, and the disease is Friedreich's Ataxia. In some embodiments, the target mitochondrial protein is POLG, and the disease is Alpers Syndrome. In some embodiments, the target mitochondrial protein is COX6A2, and the disease is mitochondrial complex IV deficiency nuclear type 18 (MC4DN18). In some embodiments, the target mitochondrial protein is UQCC2, and the disease is mitochondrial complex III deficiency nuclear 7 (MC3DN7). In some embodiments, the target mitochondrial protein is LYRM7, and the disease is mitochondrial complex III deficiency nuclear 8 (MC3DN8).

### 5.7 Kits

[0211] In one aspect, provided herein are kits comprising a fusion protein described herein, a nucleic acid encoding a fusion protein described herein, a vector comprising a nucleic acid encoding a fusion protein described herein, or a viral particle comprising a nucleic acid encoding a fusion protein described herein, for therapeutic uses. Kits typically include a label indicating the intended use of the contents of the kit and instructions for use. The term label includes any writing, or recorded material supplied on or with the kit, or which otherwise accompanies the kit. Accordingly, this disclosure provides a kit for treating a subject afflicted with a disease (e.g., a genetic disease), the kit comprising: (a) a dosage of a fusion protein, a nucleic acid encoding a fusion protein described herein, a vector comprising a nucleic acid encoding a fusion protein described herein, or a viral particle comprising a nucleic acid encoding a fusion described herein; and (b) instructions for using the fusion protein in any of the therapy methods disclosed herein.

### 6. EXAMPLES

[0212] The present invention is further illustrated by the following examples which should not be construed as further limiting.

### 6.1 Example 1. Generation of Targeted Engineered Deubiquitinases

[0213] This example provides general experimental methods of using fluorescent tagged target proteins together with fluorophore tagged engineered deubiquitinases (enDUBs) to demonstrate up-regulation of expression in the context of an enDUB. For illustrative purposes the constructs disclosed below will be synthesized in a suitable vector for mammalian expression. Generally, the target protein will be expressed with a C-terminal YFP followed by a P2A cleavage signal and an mCherry protein as a second reporter (Target protein-YFP-P2A-mCherry). This construct will be co-transfected in the presence of a trifunctional fusion protein comprising of a CFP protein followed by a P2A signal and a nanobody specifically binding to YPF followed by the engineered DUB (CFP-P2A-Anti-YFPnanobody-enDUB). In applications for drug treatment the targeting nanobodies (or other specific binders) will be directed to the wild type (or disease-causing mutant) protein in the cell to be upregulated while the enDUB is fused to a binding protein directed to the target protein. Target protein binding moieties could be any antibody or antibody fragments, nanobodies, or any other non-antibody scaffold such as fibronectins, anticalins, ankyrin repeats or natural binding proteins interacting specifically with the target protein to be upregulated. The amino acid sequence of the components of the test fusion proteins is provided in Table 5 below.

TABLE 5
Amino Acid Sequence of Components of test fusion proteins

| | | |
|---|---|---|
| | SEQ | |
| Description | ID NO | Amino Acid Sequence |

Target Proteins

| | | |
|---|---|---|
| Elongation | 225 | MAAATLLRATPHESGLAAGRTELLQGLLRLLKAPALPLLCRGLAVE |
| factor TU | | AKKTYVRDKPHVNVGTIGHVDHGKTTLTAAITKILAEGGGAKFKKY |
| | | EEIDNAPEERARGITINAAHVEYSTAARHYAHTDCPGHADYVKNMI |
| | | TGTAPLDGCILVVAANDGPMPQTREHLLLARQIGVEHVVVYVNKAD |
| | | AVQDSEMVELVELEIRELLTEFGYKGEETPVIVGSALCALEGRDPE |
| | | LGLKSVQKLLDAVDTYIPVPARDLEKPFLLPVEAVYSVPGRGTVVT |
| | | GTLERGILKKGDECELLGHSKNIRTVVTGIEMFHKSLERAEAGDNL |
| | | GALVRGLKREDLRRGLVMVKPGSIKPHQKVEAQVYILSKEEGGRHK |
| | | PFVSHFMPVMFSLTWDMACRIILPPEKELAMPGEDLKENLILRQPM |
| | | ILEKGQRFTLRDGNRTIGTGLVTNTLAMTEEEKNIKWG |
| BAX | 226 | MDGSGEQPRGGGPTSSEQIMKTGALLLQGFIQDRAGRMGGEAPELA |
| | | LDPVPQDASTKKLSECLKRIGDELDSNMELQRMIAAVDTDSPREVE |
| | | FRVAADMESDGNENWGRVVALFYFASKLVLKALCTKVPELIRTIMG |
| | | WTLDFLRERLLGWIQDQGGWDGLLSYFGTPTWQTVTIFVAGVLTAS |
| | | LTIWKKMG |

Fluorescent Proteins

| | | |
|---|---|---|
| YFP | 227 | VSKGEELFTGVVPILVELDGDVNGHKFSVSGEGEGDATYGKLTLKF |
| | | ICTTGKLPVPWPTLVTTFGYGLQCFARYPDHMKQHDFFKSAMPEGY |
| | | VQERTIFFKDDGNYKTRAEVKFEGDTLVNRIELKGIDFKEDGNILG |
| | | HKLEYNYNSHNVYIMADKQKNGIKVNFKIRHNIEDGSVQLADHYQQ |
| | | NTPIGDGPVLLPDNHYLSYQSALSKDPNEKRDHMVLLEFVTAAGIT |
| | | LGMDELYK |
| mCherry | 228 | MVSKGEEDNMAIIKEFMRFKVHMEGSVNGHEFEIEGEGEGRPYEGT |
| | | QTAKLKVTKGGPLPFAWDILSPQFMYGSKAYVKHPADIPDYLKLSF |
| | | PEGFKWERVMNFEDGGVVTVTQDSSLQDGEFIYKVKLRGTNFPSDG |
| | | PVMQKKTMGWEASSERMYPEDGALKGEIKQRLKLKDGGHYDAEVKT |
| | | TYKAKKPVQLPGAYNVNIKLDITSHNEDYTIVEQYERAEGRHSTGG |
| | | MDELYK |
| CFP | 229 | MVSKGEELFTGVVPILVELDGDVNGHKESVSGEGEGDATYGKLTLK |
| | | FICTTGKLPVPWPTLVTTLTWGVQCFSRYPDHMKQHDEFKSAMPEG |
| | | YVQERTIFFKDDGNYKTRAEVKFEGDTLVNRIELKGIDFKEDGNIL |
| | | GHKLEYNYISHNVYITADKQKNGIKANFKIRHNIEDGSVQLADHYQ |
| | | QNTPIGDGPVLLPDNHYLSTQSALSKDPNEKRDHMVLLEFVTAAGI |
| | | TLGMDELYK |

A2 Peptides

| | | |
|---|---|---|
| P2A | 230 | GSGATNFSLLKQAGDVEENPGP |
| T2A | 231 | GSGEGRGSLLTCGDVEENPGP |
| E2A | 232 | GSGQCTNYALLKLAGDVESNPGP |

Target Binders

| | | |
|---|---|---|
| YFP targeting | 233 | QVQLVESGGALVQPGGSLRLSCAASGFPVNRYSMRWYRQAPGKERE |
| nanobody | | WVAGMSSAGDRSSYEDSVKGRFTISRDDARNTVYLQMNSLKPEDTA |
| | | VYYCNVNVGFEYWGQGTQVTVSS |
| Elongation | 234 | QVQLQESGGGLAQAGGSLRLSCAASGRMFSINNMGWYRQAPGKORE |
| factor TU binder | | LVAFITRGGTTTYADSMKGRVTISRDNAKNTVYLQMNSLKPEDTAV |
| (monobody) | | YYCAADDINNPRRTTTYWGQGTQVTISS |
| BAX binder | 235 | DVQLQASGGGLVQAGGSLRLSCAASGRTESSYAMGWERRAPGKERE |
| 1(monobody) | | FVAAISWSGTNTNYADSVKGRFTISRDNAKNTMYLQMNRLAPEDTA |
| | | VYYCAATSTRTYYYTTSRSNEYVYWGQGTQVTVSS |
| BAX binder | 236 | DVQLQASGGGLVQAGGSLRLSCAASGRTNSWYSMGWFRQAPGKERE |
| 2(monobody) | | FVAAISWNGDAIYYTDSVKGRFTISRDNTKNTVYLQMNSLKPEDTA |
| | | VYICAAHAAAFTEAAHIPGYEYWGQGTQVTVSS |

EnDUBS

| | | |
|---|---|---|
| Cezanne | 237 | PPSFSEGSGGSRTPEKGFSDREPTRPPRPILQRQDDIVQEKRLSRG |
| | | ISHASSSIVSLARSHVSSNGGGGGSNEHPLEMPICAFQLPDLTVYN |
| | | EDERSFIERDLIEQSMLVALEQAGRLNWWVSVDPTSQRLLPLATTG |
| | | DGNCLLHAASLGMWGFHDRDLMLRKALYALMEKGVEKEALKRRWRW |
| | | QQTQQNKESGLVYTEDEWQKEWNELIKLASSEPRMHLGTNGANCGG |
| | | VESSEEPVYESLEEFHVFVLAHVLRRPIVVVADTMLRDSGGEAFAP |
| | | IPFGGIYLPLEVPASQCHRSPLVLAYDQAHFSALVSMEQKENTKEQ |
| | | AVIPLTDSEYKLLPLHFAVDPGKGWEWGKDDSDNVRLASVILSLEV |
| | | KLHLLHSYMNVKWIPLSSDAQAPLAQ |
| OTUD1 | 238 | DEKLALYLAEVEKQDKYLRQRNKYRFHIIPDGNCLYRAVSKTVYGD |
| | | QSLHRELREQTVHYIADHLDHFSPLIEGDVGEFIIAAAQDGAWAGY |
| | | PELLAMGQMLNVNIHLTTGGRLESPTVSTMIHYLGPEDSLRPSIWL |
| | | SWLSNGHYDAVEDHSYPNPEYDNWCKQTQVQRKRDEELAKSMAISL |
| | | SKMYIEQNACS |
| TRABID | 239 | LEVDFKKLKQIKNRMKKTDWLFLNACVGVVEGDLAAIEAYKSSGGD |
| | | IARQLTADEVRLLNRPSAFDVGYTLVHLAIRFQRQDMLAILLTEVS |
| | | QQAAKCIPAMVCPELTEQIRREIAASLHQRKGDFACYFLTDLVTFT |
| | | LPADIEDLPPTVQEKLFDEVLDRDVQKELEEESPIINWSLELATRL |
| | | DSRLYALWNRTAGDCLLDSVLQATWGIYDKDSVLRKALHDSLHDCS |
| | | HWFYTRWKDWESWYSQSFGLHESLREEQWQEDWAFILSLASQPGAS |
| | | LEQTHIFVLAHILRRPIIVYGVKYYKSFRGETLGYTRFQGVYLPLL |
| | | WEQSFCWKSPIALGYTRGHESALVAMENDGYGNRGAGANLNTDDDV |
| | | TITFLPLVDSERKLLHVHELSAQELGNEEQQEKLLREWLDCCVTEG |
| | | GVLVAMQKSSRRRNHPLVTQMVEKWLDRYRQIRPCTSLS |
| USP21 | 240 | SDDKMAHHTLLLGSGHVGLRNLGNTCELNAVLQCLSSTRPLRDECL |
| | | RRDFRQEVPGGGRAQELTEAFADVIGALWHPDSCEAVNPTRFRAVE |
| | | QKYVPSFSGYSQQDAQEFLKLLMERLHLEINRRGRRAPPILANGPV |
| | | PSPPRRGGALLEEPELSDDDRANLMWKRYLEREDSKIVDLFVGQLK |
| | | SCLKCQACGYRSTTFEVFCDLSLPIPKKGFAGGKVSLRDCENLETK |
| | | EEELESENAPVCDRCRQKTRSTKKLTVQRFPRILVLHLNRESASRG |
| | | SIKKSSVGVDFPLQRLSLGDFASDKAGSPVYQLYALCNHSGSVHYG |
| | | HYTALCRCQTGWHVYNDSRVSPVSENQVASSEGYVLFYQLMQEPPR |
| | | CL |
| OTUD4 | 241 | ATPMDAYLRKLGLYRKLVAKDGSCLFRAVAEQVLHSQSRHVEVRMA |
| | | CIHYLRENREKFEAFIEGSFEEYLKRLENPQEWVGQVEISALSLMY |
| | | RKDFIIYREPNVSPSQVTENNFPEKVLLCESNGNHYDIVYPIKYKE |
| | | SSAMCQSLLYELLYEKVFKTDVSKIVMELDTLEVADE |
| Human USP3 | 242 | MECPHLSSSVCIAPDSAKFPNGSPSSWCCSVCRSNKSPWVCLTCSS |
| (full length) | | VHCGRYVNGHAKKHYEDAQVPLTNHKKSEKQDKVQHTVCMDCSSYS |
| nuclear located | | TYCYRCDDFVVNDTKLGLVQKVREHLQNLENSAFTADRHKKRKLLE |
| | | NSTLNSKLLKVNGSTTAICATGLRNLGNTCEMNAILQSLSNIEQFC |
| | | CYFKELPAVELRNGKTAGRRTYHTRSQGDNNVSLVEEFRKTLCALW |
| | | QGSQTAFSPESLFYVVWKIMPNERGYQQQDAHEFMRYLLDHLHLEL |
| | | QGGFNGVSRSAILQENSTLSASNKCCINGASTVVTAIFGGILQNEV |
| | | NCLICGTESRKFDPFLDLSLDIPSQFRSKRSKNQENGPVCSLRDCL |
| | | RSFTDLEELDETELYMCHKCKKKQKSTKKFWIQKLPKVLCLHLKRF |
| | | HWTAYLRNKVDTYVEFPLRGLDMKCYLLEPENSGPESCLYDLAAVV |
| | | VHHGSGVGSGHYTAYATHEGRWFHENDSTVTLTDEETVVKAKAYIL |
| | | FYVEHQAKAGSDKL |

[0214] The amino acid sequence of the test fusion proteins is provided in Table 6 below.

TABLE 6
Amino acid sequence of exemplary test fusion proteins

| | SEQ | |
|---|---|---|
| | ID | |
| Description | NO | Amino Acid Sequence |
| Elongation | 243 | MAAATLLRATPHESGLAAGRTELLQGLLRLLKAPALPLLCRGLAVE |
| factor TU | | AKKTYVRDKPHVNVGTIGHVDHGKTTLTAAITKILAEGGGAKFKKY |
| Target-YFP- | | EEIDNAPEERARGITINAAHVEYSTAARHYAHTDCPGHADYVKNMI |
| P2A-mCherrry | | TGTAPLDGCILVVAANDGPMPQTREHLLLARQIGVEHVVVYV |
| | | NKADAVQDSEMVELVELEIRELLTEFGYKGEETPVIVGSALCALEG |
| | | RDPELGLKSVQKLLDAVDTYIPVPARDLEKPELLPVEAVYSVPGRG |
| | | TVVTGTLERGILKKGDECELLGHSKNIRTVVTGIEMFHKSLERAEA |
| | | GDNLGALVRGLKREDLRRGLVMVKPGSIKPHQKVEAQVYILS |
| | | KEEGGRHKPFVSHEMPVMESLTWDMACRIILPPEKELAMPGEDLKF |
| | | NLILRQPMILEKGQRFTLRDGNRTIGTGLVTNTLAMTEEEKNIKWG |
| | | VSKGEELFTGVVPILVELDGDVNGHKESVSGEGEGDATYGKLTLKF |
| | | ICTTGKLPVPWPTLVTTFGYGLQCFARYPDHMKQHDFFKSAMPEGY |
| | | VQERTIFFKDDGNYKTRAEVKFEGDTLVNRIELKGIDFKEDGNILG |
| | | HKLEYNYNSHNVYIMADKQKNGIKVNFKIRHNIEDGSVQLADHYQQ |
| | | NTPIGDGPVLLPDNHYLSYQSALSKDPNEKRDHMVLLEFVTAAGIT |
| | | LGMDELYKGSGATNFSLLKQAGDVEENPGPMVSKGEEDNMAIIKEF |
| | | MRFKVHMEGSVNGHEFEIEGEGEGRPYEGTQTAKLKVTKGGPLPFA |
| | | WDILSPQFMYGSKAYVKHPADIPDYLKLSFPEGFKWERVMNFEDGG |
| | | VVTVTQDSSLQDGEFIYKVKLRGTNFPSDGPVMQKKTMGWEASSER |
| | | MYPEDGALKGEIKQRLKLKDGGHYDAEVKTTYKAKKPVQLPGAYNV |
| | | NIKLDITSHNEDYTIVEQYERAEGRHSTGGMDELYK |
| BAX Target- | 244 | MDGSGEQPRGGGPTSSEQIMKTGALLLQGFIQDRAGRMGGEAPELA |
| YFP-P2A- | | LDPVPQDASTKKLSECLKRIGDELDSNMELORMIAAVDTDSPREVE |
| mCherrry | | FRVAADMESDGNENWGRVVALFYFASKLVLKALCTKVPELIRTIMG |
| | | WTLDELRERLLGWIQDQGGWDGLLSYFGTPTWQTVTIFVAGV |
| | | LTASLTIWKKMGVSKGEELFTGVVPILVELDGDVNGHKESVSGEGE |
| | | GDATYGKLTLKFICTTGKLPVPWPTLVTTFGYGLQCFARYPDHMKQ |
| | | HDFFKSAMPEGYVQERTIFFKDDGNYKTRAEVKFEGDTLVNRIELK |
| | | GIDFKEDGNILGHKLEYNYNSHNVYIMADKQKNGIKVNFKIRHNIE |
| | | DGSVQLADHYQQNTPIGDGPVLLPDNHYLSYQSALSKDPNEKRDHM |
| | | VLLEFVTAAGITLGMDELYKGSGATNFSLLKQAGDVEENPGPMVSK |
| | | GEEDNMAIIKEFMRFKVHMEGSVNGHEFEIEGEGEGRPYEGTQTAK |
| | | LKVTKGGPLPFAWDILSPQFMYGSKAYVKHPADIPDYLKLSFPEGE |
| | | KWERVMNFEDGGVVTVTQDSSLQDGEFIYKVKLRGTNFPSDGPVMQ |
| | | KKTMGWEASSERMYPEDGALKGEIKQRLKLKDGGHYDAEVKTTYKA |
| | | KKPVQLPGAYNVNIKLDITSHNEDYTIVEQYERAEGRHSTGGMDEL |
| | | YK |
| CFP-P2A- | 245 | MVSKGEELFTGVVPILVELDGDVNGHKFSVSGEGEGDATYGKLTLK |
| Cezanne enDUB | | FICTTGKLPVPWPTLVTTLTWGVQCFSRYPDHMKQHDEFKSAMPEG |
| | | YVQERTIFFKDDGNYKTRAEVKFEGDTLVNRIELKGIDFKEDGNIL |
| | | GHKLEYNYISHNVYITADKQKNGIKANFKIRHNIEDGSVQLADHYQ |
| | | QNTPIGDGPVLLPDNHYLSTQSALSKDPNEKRDHMVLLEFVTAAGI |
| | | TLGMDELYKGSGATNESLLKQAGDVEENPGPPPSESEGSGGSRTPE |
| | | KGFSDREPTRPPRPILQRODDIVQEKRLSRGISHASSSIVSLARSH |
| | | VSSNGGGGGSNEHPLEMPICAFQLPDLTVYNEDERSFIERDLIEQS |
| | | MLVALEQAGRLNWWVSVDPTSQRLLPLATTGDGNCLLHAASLGMWG |
| | | FHDRDLMLRKALYALMEKGVEKEALKRRWRWQQTQQNKESGLVYTE |
| | | DEWQKEWNELIKLASSEPRMHLGTNGANCGGVESSEEPVYESLEEF |
| | | HVFVLAHVLRRPIVVVADTMLRDSGGEAFAPIPEGGIYLPLEVPAS |
| | | QCHRSPLVLAYDQAHESALVSMEQKENTKEQAVIPLTDSEYKLLPL |
| | | HFAVDPGKGWEWGKDDSDNVRLASVILSLEVKLHLLHSYMNVKWIP |
| | | LSSDAQAPLAQ |
| CFP-P2A- | 246 | MVSKGEELFTGVVPILVELDGDVNGHKFSVSGEGEGDATYGKLTLK |
| OTUD1 enDUB | | FICTTGKLPVPWPTLVTTLTWGVQCFSRYPDHMKQHDFFKSAMPEG |
| | | YVQERTIFFKDDGNYKTRAEVKFEGDTLVNRIELKGIDFKEDGNIL |
| | | GHKLEYNYISHNVYITADKQKNGIKANFKIRHNIEDGSVQLADHYQ |
| | | QNTPIGDGPVLLPDNHYLSTQSALSKDPNEKRDHMVLLEFVTAAGI |
| | | TLGMDELYKGSGATNFSLLKQAGDVEENPGPDEKLALYLAEVEKQD |
| | | KYLRORNKYRFHIIPDGNCLYRAVSKTVYGDQSLHRELREQTVHYI |
| | | ADHLDHFSPLIEGDVGEFIIAAAQDGAWAGYPELLAMGQMLNVNIH |
| | | LTTGGRLESPTVSTMIHYLGPEDSLRPSIWLSWLSNGHYDAVEDHS |
| | | YPNPEYDNWCKQTQVQRKRDEELAKSMAISLSKMYIEQNACS |
| CFP-P2A- | 247 | MVSKGEELFTGVVPILVELDGDVNGHKFSVSGEGEGDATYGKLTLK |
| TRABID | | FICTTGKLPVPWPTLVTTLTWGVQCFSRYPDHMKQHDFFKSAMPEG |
| enDUB | | YVQERTIFFKDDGNYKTRAEVKFEGDTLVNRIELKGIDFKEDGNIL |
| | | GHKLEYNYISHNVYITADKOKNGIKANFKIRHNIEDGSVQLADHYQ |
| | | QNTPIGDGPVLLPDNHYLSTQSALSKDPNEKRDHMVLLEFVTAAGI |
| | | TLGMDELYKGSGATNFSLLKQAGDVEENPGPLEVDEKKLKQIKNRM |
| | | KKTDWLFLNACVGVVEGDLAAIEAYKSSGGDIARQLTADEVRLLNR |
| | | PSAFDVGYTLVHLAIRFQRQDMLAILLTEVSQQAAKCIPAMVCPEL |
| | | TEQIRREIAASLHQRKGDFACYFLTDLVTFTLPADIEDLPPTVQEK |
| | | LFDEVLDRDVQKELEEESPIINWSLELATRLDSRLYALWNRTAGDC |
| | | LLDSVLQATWGIYDKDSVLRKALHDSLHDCSHWFYTRWKDWESWYS |
| | | QSFGLHESLREEQWQEDWAFILSLASQPGASLEQTHIFVLAHILRR |
| | | PIIVYGVKYYKSFRGETLGYTRFQGVYLPLLWEQSFCWKSPIALGY |
| | | TRGHFSALVAMENDGYGNRGAGANLNTDDDVTITFLPLVDSERKLL |
| | | HVHELSAQELGNEEQQEKLLREWLDCCVTEGGVLVAMQKSSRRRNH |
| | | PLVTQMVEKWLDRYRQIRPCTSLS |
| CFP-P2A- | 248 | MVSKGEELFTGVVPILVELDGDVNGHKFSVSGEGEGDATYGKLTLK |
| USP21 enDUB | | FICTTGKLPVPWPTLVTTLTWGVQCFSRYPDHMKQHDFFKSAMPEG |
| | | YVQERTIFFKDDGNYKTRAEVKFEGDTLVNRIELKGIDFKEDGNIL |
| | | GHKLEYNYISHNVYITADKQKNGIKANFKIRHNIEDGSVQLADHYQ |
| | | QNTPIGDGPVLLPDNHYLSTQSALSKDPNEKRDHMVLLEFVTAAGI |
| | | TLGMDELYKGSGATNFSLLKQAGDVEENPGPSDDKMAHHTLLLGSG |
| | | HVGLRNLGNTCFLNAVLQCLSSTRPLRDFCLRRDERQEVPGGGRAQ |
| | | ELTEAFADVIGALWHPDSCEAVNPTRFRAVFQKYVPSFSGYSQQDA |
| | | QEFLKLLMERLHLEINRRGRRAPPILANGPVPSPPRRGGALLEEPE |
| | | LSDDDRANLMWKRYLEREDSKIVDLFVGQLKSCLKCQACGYRSTTE |
| | | EVFCDLSLPIPKKGFAGGKVSLRDCENLFTKEEELESENAPVCDRC |
| | | ROKTRSTKKLTVQRFPRILVLHLNRFSASRGSIKKSSVGVDFPLQR |
| | | LSLGDFASDKAGSPVYQLYALCNHSGSVHYGHYTALCRCQTGWHVY |
| | | NDSRVSPVSENQVASSEGYVLFYQLMQEPPRCL |
| CFP-P2A- | 249 | MVSKGEELFTGVVPILVELDGDVNGHKFSVSGEGEGDATYGKLTLK |
| OTUD4 enDUB | | FICTTGKLPVPWPTLVTTLTWGVQCFSRYPDHMKQHDFFKSAMPEG |
| | | YVQERTIFFKDDGNYKTRAEVKFEGDTLVNRIELKGIDFKEDGNIL |
| | | GHKLEYNYISHNVYITADKQKNGIKANFKIRHNIEDGSVQLADHYQ |
| | | QNTPIGDGPVLLPDNHYLSTQSALSKDPNEKRDHMVLLEFVTAAGI |
| | | TLGMDELYKGSGATNFSLLKQAGDVEENPGPATPMDAYLRKLGLYR |
| | | KLVAKDGSCLFRAVAEQVLHSQSRHVEVRMACIHYLRENREKFEAF |
| | | IEGSFEEYLKRLENPQEWVGQVEISALSLMYRKDFIIYREPNVSPS |
| | | QVTENNFPEKVLLCFSNGNHYDIVYPIKYKESSAMCQSLLYELLYE |
| | | KVFKTDVSKIVMELDTLEVADE |
| CFP-P2A-a- | 250 | MVSKGEELFTGVVPILVELDGDVNGHKESVSGEGEGDATYGKLTLK |
| YFPnanobody- | | FICTTGKLPVPWPTLVTTLTWGVQCESRYPDHMKQHDFFKSAMPEG |
| Cezanne enDUB | | YVQERTIFFKDDGNYKTRAEVKFEGDTLVNRIELKGIDFKEDGNIL |
| | | GHKLEYNYISHNVYITADKQKNGIKANFKIRHNIEDGSVQLADHYQ |
| | | QNTPIGDGPVLLPDNHYLSTQSALSKDPNEKRDHMVLLEFVTAAGI |
| | | TLGMDELYKGSGATNFSLLKQAGDVEENPGPQVQLVESGGALVQPG |
| | | GSLRLSCAASGFPVNRYSMRWYRQAPGKEREWVAGMSSAGDRSSYE |
| | | DSVKGRFTISRDDARNTVYLQMNSLKPEDTAVYYCNVNVGFEYWGQ |
| | | GTQVTVSSPPSFSEGSGGSRTPEKGESDREPTRPPRPILQRQDDIV |
| | | QEKRLSRGISHASSSIVSLARSHVSSNGGGGGSNEHPLEMPICAFQ |
| | | LPDLTVYNEDERSFIERDLIEQSMLVALEQAGRLNWWVSVDPTSQR |
| | | LLPLATTGDGNCLLHAASLGMWGFHDRDLMLRKALYALMEKGVEKE |
| | | ALKRRWRWQQTQQNKESGLVYTEDEWQKEWNELIKLASSEPRMHLG |
| | | TNGANCGGVESSEEPVYESLEEFHVFVLAHVLRRPIVVVADTMLRD |
| | | SGGEAFAPIPFGGIYLPLEVPASQCHRSPLVLAYDQAHESALVSME |
| | | QKENTKEQAVIPLTDSEYKLLPLHFAVDPGKGWEWGKDDSDNVRLA |
| | | SVILSLEVKLHLLHSYMNVKWIPLSSDAQAPLAQ |
| CFP-P2A-a- | 251 | MVSKGEELFTGVVPILVELDGDVNGHKFSVSGEGEGDATYGKLTLK |
| YFPnanobody- | | FICTTGKLPVPWPTLVTTLTWGVQCESRYPDHMKQHDFFKSAMPEG |
| OTUD1 enDUB | | YVQERTIFFKDDGNYKTRAEVKFEGDTLVNRIELKGIDFKEDGNIL |
| | | GHKLEYNYISHNVYITADKQKNGIKANFKIRHNIEDGSVQLADHYQ |
| | | QNTPIGDGPVLLPDNHYLSTQSALSKDPNEKRDHMVLLEFVTAAGI |
| | | TLGMDELYKGSGATNESLLKQAGDVEENPGPQVQLVESGGALVOPG |
| | | GSLRLSCAASGFPVNRYSMRWYRQAPGKEREWVAGMSSAGDRSSYE |
| | | DSVKGRFTISRDDARNTVYLQMNSLKPEDTAVYYCNVNVGFEYWGQ |
| | | GTQVTVSSDEKLALYLAEVEKQDKYLRQRNKYRFHIIPDGNCLYRA |
| | | VSKTVYGDQSLHRELREQTVHYIADHLDHFSPLIEGDVGEFIIAAA |
| | | QDGAWAGYPELLAMGQMLNVNIHLTTGGRLESPTVSTMIHYLGPED |
| | | SLRPSIWLSWLSNGHYDAVEDHSYPNPEYDNWCKQTQVQRKRDEEL |
| | | AKSMAISLSKMYIEQNACS |
| CFP-P2A-a- | 252 | MVSKGEELFTGVVPILVELDGDVNGHKESVSGEGEGDATYGKLTLK |
| YFPnanobody- | | FICTTGKLPVPWPTLVTTLTWGVQCFSRYPDHMKQHDFFKSAMPEG |
| TRABID | | YVQERTIFFKDDGNYKTRAEVKFEGDTLVNRIELKGIDFKEDGNIL |
| enDUB | | GHKLEYNYISHNVYITADKQKNGIKANFKIRHNIEDGSVQLADHYQ |
| | | QNTPIGDGPVLLPDNHYLSTQSALSKDPNEKRDHMVLLEFVTAAGI |
| | | TLGMDELYKGSGATNFSLLKQAGDVEENPGPQVQLVESGGALVQPG |
| | | GSLRLSCAASGFPVNRYSMRWYRQAPGKEREWVAGMSSAGDRSSYE |
| | | DSVKGRFTISRDDARNTVYLQMNSLKPEDTAVYYCNVNVGFEYWGQ |
| | | GTQVTVSSLEVDFKKLKQIKNRMKKTDWLELNACVGVVEGDLAAIE |
| | | AYKSSGGDIARQLTADEVRLLNRPSAFDVGYTLVHLAIRFQRQDML |
| | | AILLTEVSQQAAKCIPAMVCPELTEQIRREIAASLHQRKGDFACYF |
| | | LTDLVTFTLPADIEDLPPTVQEKLFDEVLDRDVQKELEEESPIINW |
| | | SLELATRLDSRLYALWNRTAGDCLLDSVLQATWGIYDKDSVLRKAL |
| | | HDSLHDCSHWFYTRWKDWESWYSQSFGLHESLREEQWQEDWAFILS |
| | | LASQPGASLEQTHIFVLAHILRRPIIVYGVKYYKSFRGETLGYTRE |
| | | QGVYLPLLWEQSFCWKSPIALGYTRGHFSALVAMENDGYGNRGAGA |
| | | NLNTDDDVTITFLPLVDSERKLLHVHELSAQELGNEEQQEKLLREW |
| | | LDCCVTEGGVLVAMQKSSRRRNHPLVTQMVEKWLDRYRQIRPCTSL |
| CFP-P2A-a- | 253 | MVSKGEELFTGVVPILVELDGDVNGHKESVSGEGEGDATYGKLTLK |
| YFPnanobody- | | FICTTGKLPVPWPTLVTTLTWGVQCFSRYPDHMKQHDFFKSAMPEG |
| USP21 enDUB | | YVQERTIFFKDDGNYKTRAEVKFEGDTLVNRIELKGIDFKEDGNIL |
| | | GHKLEYNYISHNVYITADKQKNGIKANFKIRHNIEDGSVQLADHYQ |
| | | QNTPIGDGPVLLPDNHYLSTQSALSKDPNEKRDHMVLLEFVTAAGI |
| | | TLGMDELYKGSGATNESLLKQAGDVEENPGPQVQLVESGGALVQPG |
| | | GSLRLSCAASGFPVNRYSMRWYRQAPGKEREWVAGMSSAGDRSSYE |
| | | DSVKGRFTISRDDARNTVYLQMNSLKPEDTAVYYCNVNVGFEYWGQ |
| | | GTQVTVSSSDDKMAHHTLLLGSGHVGLRNLGNTCELNAVLQCLSST |
| | | RPLRDFCLRRDFRQEVPGGGRAQELTEAFADVIGALWHPDSCEAVN |
| | | PTRFRAVFQKYVPSFSGYSQQDAQEFLKLLMERLHLEINRRGRRAP |
| | | PILANGPVPSPPRRGGALLEEPELSDDDRANLMWKRYLEREDSKIV |
| | | DLFVGQLKSCLKCQACGYRSTTFEVFCDLSLPIPKKGFAGGKVSLR |
| | | DCFNLFTKEEELESENAPVCDRCRQKTRSTKKLTVQRFPRILVLHL |
| | | NRFSASRGSIKKSSVGVDFPLQRLSLGDFASDKAGSPVYQLYALCN |
| | | HSGSVHYGHYTALCRCQTGWHVYNDSRVSPVSENQVASSEGYVLFY |
| | | QLMQEPPRCL |
| CFP-P2A-a- | 254 | MVSKGEELFTGVVPILVELDGDVNGHKFSVSGEGEGDATYGKLTLK |
| YFPnanobody- | | FICTTGKLPVPWPTLVTTLTWGVQCFSRYPDHMKQHDFFKSAMPEG |
| OTUD4 enDUB | | YVQERTIFFKDDGNYKTRAEVKFEGDTLVNRIELKGIDFKEDGNIL |
| | | GHKLEYNYISHNVYITADKQKNGIKANFKIRHNIEDGSVQLADHYQ |
| | | QNTPIGDGPVLLPDNHYLSTQSALSKDPNEKRDHMVLLEFVTAAGI |
| | | TLGMDELYKGSGATNFSLLKQAGDVEENPGPQVQLVESGGALVQPG |
| | | GSLRLSCAASGFPVNRYSMRWYRQAPGKEREWVAGMSSAGDRSSYE |
| | | DSVKGRFTISRDDARNTVYLQMNSLKPEDTAVYYCNVNVGFEYWGQ |
| | | GTQVTVSSATPMDAYLRKLGLYRKLVAKDGSCLFRAVAEQVLHSQS |
| | | RHVEVRMACIHYLRENREKFEAFIEGSFEEYLKRLENPQEWVGQVE |
| | | ISALSLMYRKDFIIYREPNVSPSQVTENNFPEKVLLCFSNGNHYDI |
| | | VYPIKYKESSAMCQSLLYELLYEKVEKTDVSKIVMELDTLEVADE |
| CFP-P2A-anti- | 255 | MVSKGEELFTGVVPILVELDGDVNGHKFSVSGEGEGDATYGKLTLK |
| Elongation | | FICTTGKLPVPWPTLVTTLTWGVQCFSRYPDHMKQHDFFKSAMPEG |
| factor TU | | YVQERTIFFKDDGNYKTRAEVKFEGDTLVNRIELKGIDFKEDGNIL |
| targeting | | GHKLEYNYISHNVYITADKQKNGIKANFKIRHNIEDGSVQLADHYQ |
| binder-Cezanne | | QNTPIGDGPVLLPDNHYLSTQSALSKDPNEKRDHMVLLEFVTAAGI |
| enDUB | | TLGMDELYKGSGATNFSLLKQAGDVEENPGPQVQLQESGGGLAQAG |
| | | GSLRLSCAASGRMESINNMGWYRQAPGKQRELVAFITRGGTTTYAD |
| | | SMKGRVTISRDNAKNTVYLQMNSLKPEDTAVYYCAADDINNPRRTT |
| | | TYWGQGTQVTISSPPSFSEGSGGSRTPEKGESDREPTRPPRPILQR |
| | | QDDIVQEKRLSRGISHASSSIVSLARSHVSSNGGGGGSNEHPLEMP |
| | | ICAFQLPDLTVYNEDERSFIERDLIEQSMLVALEQAGRLNWWVSVD |
| | | PTSQRLLPLATTGDGNCLLHAASLGMWGFHDRDLMLRKALYALMEK |
| | | GVEKEALKRRWRWQQTQQNKESGLVYTEDEWQKEWNELIKLASSEP |
| | | RMHLGTNGANCGGVESSEEPVYESLEEFHVFVLAHVLRRPIVVVAD |
| | | TMLRDSGGEAFAPIPEGGIYLPLEVPASQCHRSPLVLAYDQAHFSA |
| | | LVSMEQKENTKEQAVIPLTDSEYKLLPLHFAVDPGKGWEWGKDDSD |
| | | NVRLASVILSLEVKLHLLHSYMNVKWIPLSSDAQAPLAQ |
| CFP-P2A-anti- | 256 | MVSKGEELFTGVVPILVELDGDVNGHKESVSGEGEGDATYGKLTLK |
| Elongation | | FICTTGKLPVPWPTLVTTLTWGVQCFSRYPDHMKQHDFFKSAMPEG |
| factor TU | | YVQERTIFFKDDGNYKTRAEVKFEGDTLVNRIELKGIDFKEDGNIL |
| targeting | | GHKLEYNYISHNVYITADKQKNGIKANFKIRHNIEDGSVQLADHYQ |
| binder-OTUD1 | | QNTPIGDGPVLLPDNHYLSTQSALSKDPNEKRDHMVLLEFVTAAGI |
| enDUB | | TLGMDELYKGSGATNFSLLKQAGDVEENPGPQVQLQESGGGLAQAG |
| | | GSLRLSCAASGRMESINNMGWYRQAPGKQRELVAFITRGGTTTYAD |
| | | SMKGRVTISRDNAKNTVYLQMNSLKPEDTAVYYCAADDINNPRRTT |
| | | TYWGQGTQVTISSDEKLALYLAEVEKODKYLRQRNKYRFHIIPDGN |
| | | CLYRAVSKTVYGDQSLHRELREQTVHYIADHLDHFSPLIEGDVGEF |
| | | IIAAAQDGAWAGYPELLAMGQMLNVNIHLTTGGRLESPTVSTMIHY |
| | | LGPEDSLRPSIWLSWLSNGHYDAVEDHSYPNPEYDNWCKQTQVQRK |
| | | RDEELAKSMAISLSKMYIEQNACS |
| CFP-P2A-anti- | 257 | MVSKGEELFTGVVPILVELDGDVNGHKESVSGEGEGDATYGKLTLK |
| Elongation | | FICTTGKLPVPWPTLVTTLTWGVQCFSRYPDHMKQHDFFKSAMPEG |
| factor TU | | YVQERTIFFKDDGNYKTRAEVKFEGDTLVNRIELKGIDFKEDGNIL |
| targeting | | GHKLEYNYISHNVYITADKQKNGIKANFKIRHNIEDGSVQLADHYQ |
| binder-TRABID | | QNTPIGDGPVLLPDNHYLSTQSALSKDPNEKRDHMVLLEFVTAAGI |
| enDUB | | TLGMDELYKGSGATNFSLLKQAGDVEENPGPQVQLQESGGGLAQAG |
| | | GSLRLSCAASGRMFSINNMGWYRQAPGKQRELVAFITRGGTTTYAD |
| | | SMKGRVTISRDNAKNTVYLQMNSLKPEDTAVYYCAADDINNPRRTT |
| | | TYWGQGTQVTISSLEVDFKKLKQIKNRMKKTDWLFLNACVGVVEGD |
| | | LAAIEAYKSSGGDIARQLTADEVRLLNRPSAFDVGYTLVHLAIRFQ |
| | | RQDMLAILLTEVSQQAAKCIPAMVCPELTEQIRREIAASLHQRKGD |
| | | FACYFLTDLVTFTLPADIEDLPPTVQEKLEDEVLDRDVQKELEEES |
| | | PIINWSLELATRLDSRLYALWNRTAGDCLLDSVLQATWGIYDKDSV |
| | | LRKALHDSLHDCSHWFYTRWKDWESWYSQSFGLHESLREEQWQEDW |
| | | AFILSLASQPGASLEQTHIFVLAHILRRPIIVYGVKYYKSERGETL |
| | | GYTRFQGVYLPLLWEQSFCWKSPIALGYTRGHFSALVAMENDGYGN |
| | | RGAGANLNTDDDVTITFLPLVDSERKLLHVHELSAQELGNEEQQEK |
| | | LLREWLDCCVTEGGVLVAMQKSSRRRNHPLVTQMVEKWLDRYRQIR |
| | | PCTSLS |
| CFP-P2A-anti- | 258 | MVSKGEELFTGVVPILVELDGDVNGHKFSVSGEGEGDATYGKLTLK |
| Elongation | | FICTTGKLPVPWPTLVTTLTWGVQCESRYPDHMKQHDFFKSAMPEG |
| factor TU | | YVQERTIFFKDDGNYKTRAEVKFEGDTLVNRIELKGIDFKEDGNIL |
| targeting | | GHKLEYNYISHNVYITADKQKNGIKANFKIRHNIEDGSVQLADHYQ |
| binder-USP21 | | QNTPIGDGPVLLPDNHYLSTQSALSKDPNEKRDHMVLLEFVTAAGI |
| enDUB | | TLGMDELYKGSGATNF |
| | | QVQLQESGGGLAQAGGSLRLSCAASGRMESINNMGWYRQAPGKORE |
| | | LVAFITRGGTTTYADSMKGRVTISRDNAKNTVYLQMNSLKPEDTAV |
| | | YYCAADDINNPRRTTTYWGQGTQVTISSSDDKMAHHTLLLGSGHVG |
| | | LRNLGNTCFLNAVLQCLSSTRPLRDFCLRRDFRQEVPGGGRAQELT |
| | | EAFADVIGALWHPDSCEAVNPTRFRAVFQKYVPSFSGYSQQDAQEF |
| | | LKLLMERLHLEINRRGRRAPPILANGPVPSPPRRGGALLEEPELSD |
| | | DDRANLMWKRYLEREDSKIVDLFVGQLKSCLKCQACGYRSTTFEVE |
| | | CDLSLPIPKKGFAGGKVSLRDCFNLFTKEEELESENAPVCDRCRQK |
| | | TRSTKKLTVQRFPRILVLHLNRFSASRGSIKKSSVGVDFPLQRLSL |
| | | GDFASDKAGSPVYQLYALCNHSGSVHYGHYTALCRCQTGWHVYNDS |
| | | RVSPVSENQVASSEGYVLFYQLMQEPPRCL |
| CFP-P2A-anti- | 259 | MVSKGEELFTGVVPILVELDGDVNGHKFSVSGEGEGDATYGKLTLK |
| Elongation | | FICTTGKLPVPWPTLVTTLTWGVQCFSRYPDHMKQHDFFKSAMPEG |
| factor TU | | YVQERTIFFKDDGNYKTRAEVKFEGDTLVNRIELKGIDFKEDGNIL |
| targeting | | GHKLEYNYISHNVYITADKQKNGIKANFKIRHNIEDGSVQLADHYQ |
| binder-OTUD4 | | QNTPIGDGPVLLPDNHYLSTQSALSKDPNEKRDHMVLLEFVTAAGI |
| enDUB | | TLGMDELYKGSGATNFSLLKQAGDVEENPGPQVOLQESGGGLAQAG |
| | | GSLRLSCAASGRMESINNMGWYRQAPGKQRELVAFITRGGTTTYAD |
| | | SMKGRVTISRDNAKNTVYLQMNSLKPEDTAVYYCAADDINNPRRTT |
| | | TYWGQGTQVTISSATPMDAYLRKLGLYRKLVAKDGSCLFRAVAEQV |
| | | LHSQSRHVEVRMACIHYLRENREKFEAFIEGSFEEYLKRLENPQEW |
| | | VGQVEISALSLMYRKDFIIYREPNVSPSQVTENNFPEKVLLCESNG |
| | | NHYDIVYPIKYKESSAMCQSLLYELLYEKVEKTDVSKIVMELDTLE |
| | | VADE |
| CFP-P2A-anti- | 260 | MVSKGEELFTGVVPILVELDGDVNGHKESVSGEGEGDATYGKLTLK |
| BAX A | | FICTTGKLPVPWPTLVTTLTWGVQCFSRYPDHMKQHDFFKSAMPEG |
| targeting | | YVQERTIFFKDDGNYKTRAEVKFEGDTLVNRIELKGIDFKEDGNIL |
| binder-Cezanne | | GHKLEYNYISHNVYITADKQKNGIKANFKIRHNIEDGSVQLADHYQ |
| enDUB | | QNTPIGDGPVLLPDNHYLSTQSALSKDPNEKRDHMVLLEFVTAAGI |
| | | TLGMDELYKGSGATNFSLLKQAGDVEENPGPDVQLQASGGGLVQAG |
| | | GSLRLSCAASGRTESSYAMGWFRRAPGKEREFVAAISWSGTNTNYA |
| | | DSVKGRFTISRDNAKNTMYLQMNRLAPEDTAVYYCAATSTRTYYYT |
| | | TSRSNEYVYWGQGTQVTVSSPPSFSEGSGGSRTPEKGFSDREPTRP |
| | | PRPILQRQDDIVQEKRLSRGISHASSSIVSLARSHVSSNGGGGGSN |
| | | EHPLEMPICAFQLPDLTVYNEDERSFIERDLIEQSMLVALEQAGRL |
| | | NWWVSVDPTSQRLLPLATTGDGNCLLHAASLGMWGFHDRDLMLRKA |
| | | LYALMEKGVEKEALKRRWRWQQTQQNKESGLVYTEDEWQKEWNELI |
| | | KLASSEPRMHLGTNGANCGGVESSEEPVYESLEEFHVFVLAHVLRR |
| | | PIVVVADTMLRDSGGEAFAPIPEGGIYLPLEVPASQCHRSPLVLAY |
| | | DQAHFSALVSMEQKENTKEQAVIPLTDSEYKLLPLHFAVDPGKGWE |
| | | WGKDDSDNVRLASVILSLEVKLHLLHSYMNVKWIPLSSDAQAPLAQ |
| CFP-P2A-anti- | 261 | MVSKGEELFTGVVPILVELDGDVNGHKESVSGEGEGDATYGKLTLK |
| BAX A | | FICTTGKLPVPWPTLVTTLTWGVQCFSRYPDHMKQHDFFKSAMPEG |
| targeting | | YVQERTIFFKDDGNYKTRAEVKFEGDTLVNRIELKGIDFKEDGNIL |
| binder-OTUD1 | | GHKLEYNYISHNVYITADKQKNGIKANFKIRHNIEDGSVQLADHYQ |
| enDUB | | QNTPIGDGPVLLPDNHYLSTQSALSKDPNEKRDHMVLLEFVTAAGI |
| | | TLGMDELYKGSGATNFSLLKQAGDVEENPGPDVQLQASGGGLVQAG |
| | | GSLRLSCAASGRTFSSYAMGWFRRAPGKEREFVAAISWSGTNTNYA |
| | | DSVKGRFTISRDNAKNTMYLQMNRLAPEDTAVYYCAATSTRTYYYT |
| | | TSRSNEYVYWGQGTQVTVSSDEKLALYLAEVEKQDKYLRQRNKYRF |
| | | HIIPDGNCLYRAVSKTVYGDQSLHRELREQTVHYIADHLDHESPLI |
| | | EGDVGEFIIAAAQDGAWAGYPELLAMGQMLNVNIHLTTGGRLESPT |
| | | VSTMIHYLGPEDSLRPSIWLSWLSNGHYDAVEDHSYPNPEYDNWCK |
| | | QTQVQRKRDEELAKSMAISLSKMYIEQNACS |
| CFP-P2A-anti- | 262 | MVSKGEELFTGVVPILVELDGDVNGHKFSVSGEGEGDATYGKLTLK |
| BAX A | | FICTTGKLPVPWPTLVTTLTWGVQCFSRYPDHMKQHDEFKSAMPEG |
| targeting | | YVQERTIFFKDDGNYKTRAEVKFEGDTLVNRIELKGIDFKEDGNIL |
| binder-TRABID | | GHKLEYNYISHNVYITADKQKNGIKANFKIRHNIEDGSVQLADHYQ |
| enDUB | | QNTPIGDGPVLLPDNHYLSTQSALSKDPNEKRDHMVLLEFVTAAGI |
| | | TLGMDELYKGSGATNFSLLKQAGDVEENPGPDVQLQASGGGLVQAG |
| | | GSLRLSCAASGRTFSSYAMGWFRRAPGKEREFVAAISWSGTNTNYA |
| | | DSVKGRFTISRDNAKNTMYLQMNRLAPEDTAVYYCAATSTRTYYYT |
| | | TSRSNEYVYWGQGTQVTVSSLEVDFKKLKQIKNRMKKTDWLFLNAC |
| | | VGVVEGDLAAIEAYKSSGGDIARQLTADEVRLLNRPSAFDVGYTLV |
| | | HLAIRFQRQDMLAILLTEVSQQAAKCIPAMVCPELTEQIRREIAAS |
| | | LHQRKGDFACYFLTDLVTFTLPADIEDLPPTVQEKLFDEVLDRDVQ |
| | | KELEEESPIINWSLELATRLDSRLYALWNRTAGDCLLDSVLQATWG |
| | | IYDKDSVLRKALHDSLHDCSHWFYTRWKDWESWYSQSFGLHESLRE |
| | | EQWQEDWAFILSLASQPGASLEQTHIFVLAHILRRPIIVYGVKYYK |
| | | SFRGETLGYTRFQGVYLPLLWEQSFCWKSPIALGYTRGHFSALVAM |
| | | ENDGYGNRGAGANLNTDDDVTITFLPLVDSERKLLHVHELSAQELG |
| | | NEEQQEKLLREWLDCCVTEGGVLVAMQKSSRRRNHPLVTQMVEKWL |
| | | DRYRQIRPCTSLS |
| CFP-P2A-anti- | 263 | MVSKGEELFTGVVPILVELDGDVNGHKESVSGEGEGDATYGKLTLK |
| BAX A | | FICTTGKLPVPWPTLVTTLTWGVQCFSRYPDHMKQHDFFKSAMPEG |
| targeting | | YVQERTIFFKDDGNYKTRAEVKFEGDTLVNRIELKGIDFKEDGNIL |
| binder-USP21 | | GHKLEYNYISHNVYITADKOKNGIKANFKIRHNIEDGSVQLADHYQ |
| enDUB | | QNTPIGDGPVLLPDNHYLSTQSALSKDPNEKRDHMVLLEFVTAAGI |
| | | TLGMDELYKGSGATNFSLLKQAGDVEENPGPDVQLQASGGGLVQAG |
| | | GSLRLSCAASGRTESSYAMGWFRRAPGKEREFVAAISWSGTNTNYA |
| | | DSVKGRFTISRDNAKNTMYLQMNRLAPEDTAVYYCAATSTRTYYYT |
| | | TSRSNEYVYWGQGTQVTVSSSDDKMAHHTLLLGSGHVGLRNLGNTC |
| | | FLNAVLQCLSSTRPLRDFCLRRDERQEVPGGGRAQELTEAFADVIG |
| | | ALWHPDSCEAVNPTRFRAVFQKYVPSFSGYSQQDAQEFLKLLMERL |
| | | HLEINRRGRRAPPILANGPVPSPPRRGGALLEEPELSDDDRANLMW |
| | | KRYLEREDSKIVDLFVGQLKSCLKCQACGYRSTTFEVECDLSLPIP |
| | | KKGFAGGKVSLRDCFNLFTKEEELESENAPVCDRCRQKTRSTKKLT |
| | | VQRFPRILVLHLNRFSASRGSIKKSSVGVDFPLQRLSLGDFASDKA |
| | | GSPVYQLYALCNHSGSVHYGHYTALCRCQTGWHVYNDSRVSPVSEN |
| | | QVASSEGYVLFYQLMQEPPRCL |
| CFP-P2A-anti- | 264 | MVSKGEELFTGVVPILVELDGDVNGHKFSVSGEGEGDATYGKLTLK |
| BAX A | | FICTTGKLPVPWPTLVTTLTWGVQCFSRYPDHMKQHDFFKSAMPEG |
| targeting | | YVQERTIFFKDDGNYKTRAEVKFEGDTLVNRIELKGIDFKEDGNIL |
| binder-OTUD4 | | GHKLEYNYISHNVYITADKQKNGIKANFKIRHNIEDGSVQLADHYQ |
| enDUB | | QNTPIGDGPVLLPDNHYLSTQSALSKDPNEKRDHMVLLEFVTAAGI |
| | | TLGMDELYKGSGATNFSLLKQAGDVEENPGPDVQLQASGGGLVQAG |
| | | GSLRLSCAASGRTESSYAMGWERRAPGKEREFVAAISWSGTNTNYA |
| | | DSVKGRFTISRDNAKNTMYLQMNRLAPEDTAVYYCAATSTRTYYYT |
| | | TSRSNEYVYWGQGTQVTVSSATPMDAYLRKLGLYRKLVAKDGSCLF |
| | | RAVAEQVLHSQSRHVEVRMACIHYLRENREKFEAFIEGSFEEYLKR |
| | | LENPQEWVGQVEISALSLMYRKDFIIYREPNVSPSQVTENNFPEKV |
| | | LLCFSNGNHYDIVYPIKYKESSAMCQSLLYELLYEKVEKTDVSKIV |
| | | MELDTLEVADE |
| CFP-P2A-anti- | 265 | MVSKGEELFTGVVPILVELDGDVNGHKFSVSGEGEGDATYGKLTLK |
| BAX B | | FICTTGKLPVPWPTLVTTLTWGVQCFSRYPDHMKQHDFFKSAMPEG |
| targeting | | YVQERTIFFKDDGNYKTRAEVKFEGDTLVNRIELKGIDFKEDGNIL |
| binder-Cezanne | | GHKLEYNYISHNVYITADKOKNGIKANFKIRHNIEDGSVQLADHYQ |
| enDUB | | QNTPIGDGPVLLPDNHYLSTQSALSKDPNEKRDHMVLLEFVTAAGI |
| | | TLGMDELYKGSGATNFSLLKQAGDVEENPGPDVQLQASGGGLVQAG |
| | | GSLRLSCAASGRTNSWYSMGWFRQAPGKEREFVAAISWNGDAIYYT |
| | | DSVKGRFTISRDNTKNTVYLQMNSLKPEDTAVYICAAHAAAFTEAA |
| | | HIPGYEYWGQGTQVTVSSPPSFSEGSGGSRTPEKGFSDREPTRPPR |
| | | PILQRQDDIVQEKRLSRGISHASSSIVSLARSHVSSNGGGGGSNEH |
| | | PLEMPICAFQLPDLTVYNEDERSFIERDLIEQSMLVALEQAGRLNW |
| | | WVSVDPTSQRLLPLATTGDGNCLLHAASLGMWGFHDRDLMLRKALY |
| | | ALMEKGVEKEALKRRWRWQQTQQNKESGLVYTEDEWQKEWNELIKL |
| | | ASSEPRMHLGTNGANCGGVESSEEPVYESLEEFHVFVLAHVLRRPI |
| | | VVVADTMLRDSGGEAFAPIPEGGIYLPLEVPASQCHRSPLVLAYDQ |
| | | AHFSALVSMEQKENTKEQAVIPLTDSEYKLLPLHFAVDPGKGWEWG |
| | | KDDSDNVRLASVILSLEVKLHLLHSYMNVKWIPLSSDAQAPLAQ |
| CFP-P2A-anti- | 266 | MVSKGEELFTGVVPILVELDGDVNGHKFSVSGEGEGDATYGKLTLK |
| BAX B | | FICTTGKLPVPWPTLVTTLTWGVQCFSRYPDHMKQHDFFKSAMPEG |
| targeting | | YVQERTIFFKDDGNYKTRAEVKFEGDTLVNRIELKGIDFKEDGNIL |
| binder-OTUD1 | | GHKLEYNYSHNVYITADKQKNGIKANFKIRHNIEDGSVQLADHYQ |
| enDUB | | QNTPIGDGPVLLPDNHYLSTQSALSKDPNEKRDHMVLLEFVTAAGI |
| | | TLGMDELYKGSGATNFSLLKQAGDVEENPGPDVQLQASGGGLVQAG |
| | | GSLRLSCAASGRTNSWYSMGWFRQAPGKEREFVAAISWNGDAIYYT |
| | | DSVKGRFTISRDNTKNTVYLQMNSLKPEDTAVYICAAHAAAFTEAA |
| | | HIPGYEYWGQGTQVTVSSDEKLALYLAEVEKODKYLRQRNKYRFHI |
| | | IPDGNCLYRAVSKTVYGDQSLHRELREQTVHYIADHLDHFSPLIEG |
| | | DVGEFIIAAAQDGAWAGYPELLAMGQMLNVNIHLTTGGRLESPTVS |
| | | TMIHYLGPEDSLRPSIWLSWLSNGHYDAVEDHSYPNPEYDNWCKQT |
| | | QVQRKRDEELAKSMAISLSKMYIEQNACS |
| CFP-P2A-anti- | 267 | MVSKGEELFTGVVPILVELDGDVNGHKFSVSGEGEGDATYGKLTLK |
| BAX B | | FICTTGKLPVPWPTLVTTLTWGVQCESRYPDHMKQHDFFKSAMPEG |
| targeting | | YVQERTIFFKDDGNYKTRAEVKFEGDTLVNRIELKGIDFKEDGNIL |
| binder-TRABID | | GHKLEYNYISHNVYITADKQKNGIKANFKIRHNIEDGSVQLADHYQ |
| enDUB | | QNTPIGDGPVLLPDNHYLSTQSALSKDPNEKRDHMVLLEFVTAAGI |
| | | TLGMDELYKGSGATNFSLLKQAGDVEENPGPDVQLQASGGGLVQAG |
| | | GSLRLSCAASGRINSWYSMGWFRQAPGKEREFVAAISWNGDAIYYT |
| | | DSVKGRFTISRDNTKNTVYLQMNSLKPEDTAVYICAAHAAAFTEAA |
| | | HIPGYEYWGQGTQVTVSSLEVDFKKLKQIKNRMKKTDWLFLNACVG |
| | | VVEGDLAAIEAYKSSGGDIARQLTADEVRLLNRPSAFDVGYTLVHL |
| | | AIRFQRQDMLAILLTEVSQQAAKCIPAMVCPELTEQIRREIAASLH |
| | | QRKGDFACYFLTDLVTFTLPADIEDLPPTVQEKLEDEVLDRDVQKE |
| | | LEEESPIINWSLELATRLDSRLYALWNRTAGDCLLDSVLQATWGIY |
| | | DKDSVLRKALHDSLHDCSHWFYTRWKDWESWYSQSFGLHESLREEQ |
| | | WQEDWAFILSLASQPGASLEQTHIFVLAHILRRPIIVYGVKYYKSF |
| | | RGETLGYTRFQGVYLPLLWEQSFCWKSPIALGYTRGHESALVAMEN |
| | | DGYGNRGAGANLNTDDDVTITELPLVDSERKLLHVHELSAQELGNE |
| | | EQQEKLLREWLDCCVTEGGVLVAMQKSSRRRNHPLVTQMVEKWLDR |
| | | YRQIRPCTSLS |
| CFP-P2A-anti- | 268 | MVSKGEELFTGVVPILVELDGDVNGHKFSVSGEGEGDATYGKLTLK |
| BAX B | | FICTTGKLPVPWPTLVTTLTWGVQCFSRYPDHMKQHDFFKSAMPEG |
| targeting | | YVQERTIFFKDDGNYKTRAEVKFEGDTLVNRIELKGIDFKEDGNIL |
| binder-USP21 | | GHKLEYNYISHNVYITADKQKNGIKANFKIRHNIEDGSVQLADHYQ |
| enDUB | | QNTPIGDGPVLLPDNHYLSTQSALSKDPNEKRDHMVLLEFVTAAGI |
| | | TLGMDELYKGSGATNESLLKQAGDVEENPGPDVQLQASGGGLVQAG |
| | | GSLRLSCAASGRTNSWYSMGWFRQAPGKEREFVAAISWNGDAIYYT |
| | | DSVKGRFTISRDNTKNTVYLQMNSLKPEDTAVYICAAHAAAFTEAA |
| | | HIPGYEYWGQGTQVTVSSSDDKMAHHTLLLGSGHVGLRNLGNTCEL |
| | | NAVLQCLSSTRPLRDFCLRRDFRQEVPGGGRAQELTEAFADVIGAL |
| | | WHPDSCEAVNPTRFRAVFQKYVPSFSGYSQQDAQEFLKLLMERLHL |
| | | EINRRGRRAPPILANGPVPSPPRRGGALLEEPELSDDDRANLMWKR |
| | | YLEREDSKIVDLFVGQLKSCLKCQACGYRSTTFEVFCDLSLPIPKK |
| | | GFAGGKVSLRDCFNLFTKEEELESENAPVCDRCRQKTRSTKKLTVQ |
| | | RFPRILVLHLNRESASRGSIKKSSVGVDFPLQRLSLGDFASDKAGS |
| | | PVYQLYALCNHSGSVHYGHYTALCRCQTGWHVYNDSRVSPVSENQV |
| | | ASSEGYVLFYQLMQEPPRCL |
| CFP-P2A-anti- | 269 | MVSKGEELFTGVVPILVELDGDVNGHKFSVSGEGEGDATYGKLTLK |
| BAX B | | FICTTGKLPVPWPTLVTTLTWGVQCFSRYPDHMKQHDFFKSAMPEG |
| targeting | | YVQERTIFFKDDGNYKTRAEVKFEGDTLVNRIELKGIDFKEDGNIL |
| binder-OTUD4 | | GHKLEYNYISHNVYITADKQKNGIKANFKIRHNIEDGSVQLADHYQ |
| enDUB | | QNTPIGDGPVLLPDNHYLSTQSALSKDPNEKRDHMVLLEFVTAAGI |
| | | TLGMDELYKGSGATNFSLLKQAGDVEENPGPDVQLQASGGGLVQAG |
| | | GSLRLSCAASGRINSWYSMGWFRQAPGKEREFVAAISWNGDAIYYT |
| | | DSVKGRFTISRDNTKNTVYLQMNSLKPEDTAVYICAAHAAAFTEAA |
| | | HIPGYEYWGQGTQVTVSSATPMDAYLRKLGLYRKLVAKDGSCLFRA |
| | | VAEQVLHSQSRHVEVRMACIHYLRENREKFEAFIEGSFEEYLKRLE |
| | | NPQEWVGQVEISALSLMYRKDFIIYREPNVSPSQVTENNFPEKVLL |
| | | CFSNGNHYDIVYPIKYKESSAMCQSLLYELLYEKVEKTDVSKIVME |
| | | LDTLEVADE |

### 6.2 Example 2. Testing of Targeted Engineered Deubiquitinases

[0215] To demonstrate upregulation of a target protein in the context of a specific targeting enDUB the following experiments will be performed.

[0216] Schematic constructs used:
[0217] Control experiment using non-targeting enDUB fusion
   [0218] Target-YFP-P2A-mCherrry
   [0219] CFP-P2A-enDUB (nontargeting control enDUB)
[0220] Test constructs for up-regulation:
   [0221] Target-YFP-P2A-mCherry
   [0222] CFP-P2A-a-YFPnanobody-enDUB
[0223] Or specific targeting enDUB fusion composed of
   [0224] CFP-P2A-anti-targeting binder-enDUB

[0225] Co-transfection of both plasmids carrying the YFP tagged target protein together with the enDUB fused to a target binding protein into HEK cells will be performed. A control construct carrying the enDUB in the absence of the targeting binder will also be co-transfected together with the labeled target protein. After 24-48 hours the transfected cells will be analyzed by FACS or upregulation over the control. The mCherry signal on the target protein will be used to normalize for transfection efficiency while the CFP signal will be used to normalize for the transfection efficiency of the enDUB constructs. The YFP fused to the target protein is the read-out for target gene expression and will be plotted vs the signal in the control transfection. Relative increase in the YFP fluorescence over control will demonstrate upregulation in the presence of the enDUB.

### 6.3 Example 3. Screening Assay for Testing Fusion Proteins

[0226] The following example describes an assay to analyze the ability of a targeted engineered deubiquitinase (enDub) (e.g., an enDub described herein) to increase expression of a target protein. Generally, the assay involves tagging the target protein with a fluorescent tag (e.g., NanoLuciferase (NLuc)) and an alfa-tag (α-Tag); and tagging a fusion protein of the enDub and an anti-alfa Tag nanobody with a different fluorescent tag (e.g., Firefly Luciferase (FLuc)) through a cleavable linker. The use of two different fluorescent tags enables normalization of the signal to compensate for variation in transfection/expression, as the second fluorescent tag is rapidly cleaved from the enDub-anti-alfa tag fusion protein inside the cell through cleavage of the cleavable linker. FIG. 2 provides a general schematic of the cellular aspects of the assay. The protocol, including materials and methods is described below.

[0227] CHO-K1 cells were digested with 0.25% (w/v) Trypsin-EDTA, at 37° C., for 5 min. Complete medium was added for the CHO-K1 cell cultures to stop the digestion. The CHO-K1 cells were centrifuges at 800 rpm for 5 minutes. After centrifugation, the supernatant was discarded and the CHO-K1 cells were resuspend in 2 mL culture medium and counted. 10≢CHO-K1 cells were electroporated under 440V with 0.5 ug of a plasmid encoding the target protein tagged with NLuc and alfa-tag, and 1 μg of a plasmid encoding a) enDub-anti-alfa tag nanobody-FLuc fusion protein (experimental), b) the enDub (control), or the anti-alfa tag nanobody (control). 5E+4 cells/well were placed in in 24 well plates and cultured for 24 h, at 37° C., 5% CO₂. The cells were digested with 0.25% (w/v) Trypsin-EDTA, at 37° C. for 5 min. Complete medium was added to the culture to stop the digestion and the cells were counted for use in NanoGlo® Dual Luciferase® Assay (Promega), which enables detection of FLuc and NLuc® in a single sample. The NanoGlo® Dual Luciferase® Assay was carried out according to manufacturer's instructions (Promega, Nano-Glo® Dual-Luciferase® Reporter Assay Technical Manual #TM426). Briefly, 1E+4 cells/well were placed in 96 well black plates and cultured for 24 h, at 37° C., 5% CO₂. The plates were removed from the incubator and allowed to equilibrate to room temperature. The samples were modified as needed to have a starting volume of 80 μl per well. All sample wells were injected with 80 μl of ONE-Glo™ EX Reagent and incubated for 3 minutes. The firefly luminescence was read in all sample wells using a 1-second integration time. All sample wells were injected with 80 μl of NanoDLR™ Stop & G® Reagent; and incubated for 5 minutes. The NanoLuc® luminescence of all sample wells was read using a 1-second integration time. The dispensing lines were cleaned according to manufacturer's instructions (Nano-Glo® Dual-Luciferase® Reporter Assay Technical Manual #TM426.) and the data analyzed.

[0228] The amino acid sequence of the components of the fusion proteins used in the assay are detailed in Table 7 below.

TABLE 7
Amino acid sequence of components of test fusion proteins

| | | SEQ | |
|---|---|---|---|
| Description | | ID NO | Amino Acid Sequence |
| Fluorescent | NanoLuc | 407 | VFTLEDFVGDWRQTAGYNLDQVLEQGGVSSLFQ |
| Protein | | | NLGVSVTPIQRIVLSGENGLKIDIHVIIPYEGL |
| | | | SGDQMGQIEKIFKVVYPVDDHHFKVILHYGTLV |
| | | | IDGVTPNMIDYFGRPYEGIAVEDGKKITVTGTL |
| | | | WNGNKIIDERLINPDGSLLFRVTINGVTGWRLC |
| | | | ERILA |
| | Firefly | 408 | MEDAKNIKKGPAPFYPLEDGTAGEQLHKAMKRY |
| | Luciferase | | ALVPGTIAFTDAHIEVDITYAEYFEMSVRLAEA |
| | | | MKRYGLNTNHRIVVCSENSLQFFMPVLGALFIG |
| | | | VAVAPANDIYNERELLNSMGISQPTVVFVSKKG |
| | | | LQKILNVQKKLPIIQKIIIMDSKTDYQGFQSMY |
| | | | TFVTSHLPPGENEYDFVPESEDRDKTIALIMNS |
| | | | SGSTGLPKGVALPHRTACVRFSHARDPIFGNQI |
| | | | IPDTAILSVVPFHHGFGMFTTLGYLICGFRVVL |
| | | | MYRFEEELFLRSLQDYKIQSALLVPTLESFFAK |
| | | | STLIDKYDLSNLHEIASGGAPLSKEVGEAVAKR |
| | | | FHLPGIRQGYGLTETTSAILITPEGDDKPGAVG |
| | | | KVVPFFEAKVVDLDTGKTLGVNQRGELCVRGPM |
| | | | IMSGYVNNPEATNALIDKDGWLHSGDIAYWDED |
| | | | EHFFIVDRLKSLIKYKGYQVAPAELESILLQHP |
| | | | NIFDAGVAGLPDDDAGELPAAVVVLEHGKTMTE |
| | | | KEIVDYVASQVTTAKKLRGGVVFVDEVPKGLTG |
| | | | KLDARKIREILIKAKKGGKIAVTRLK |
| Alfa Tag | | 409 | PSRLEEELRRRLTEP |
| P2A | | 410 | GSGATNFSLLKQAGDVEENPGP |
| Cezanne (Exemplary | | 411 | PPSFSEGSGGSRTPEKGFSDREPTRPPRPILQR |
| Catalytic Domain) | | | QDDIVQEKRLSRGISHASSSIVSLARSHVSSNG |
| | | | GGGGSNEHPLEMPICAFQLPDLTVYNEDERSFI |
| | | | ERDLIEQSMLVALEQAGRLNWWVSVDPTSQRLL |
| | | | PLATTGDGNCLLHAASLGMWGFHDRDLMLRKAL |
| | | | YALMEKGVEKEALKRRWRWQQTQQNKESGLVYT |
| | | | EDEWQKEWNELIKLASSEPRMHLGTNGANCGGV |
| | | | ESSEEPVYESLEEFHVFVLAHVLRRPIVVVADT |
| | | | MLRDSGGEAFAPIPFGGIYLPLEVPASQCHRSP |
| | | | LVLAYDQAHFSALVSMEQKENTKEQAVIPLTDS |
| | | | EYKLLPLHFAVDPGKGWEWGKDDSDNVRLASVI |
| | | | LSLEVKLHLLHSYMNVKWIPLSSDAQAPLAQ |

[0229] The amino acid sequence of exemplary target fusion proteins comprising a target protein, NLuc, and the alfa tag are detailed in Table 8 below.

TABLE 8
Amino Acid Sequence of exemplary Target Protein-NLuc-Alfa
Tag Fusion Proteins

| | SEQ | |
|---|---|---|
| Test Protein | ID NO | Amino Acid Sequence |
| COX6A2-nanoluc- | 412 | MALPLRPLTRGLASAAKGGHGGAGARTWRLLTFVLALPSVALCTF |
| alfa-tag-fusion | | NSYLHSGHRPRPEFRPYQHLRIRTKPYPWGDGNHTLFHNSHVNPL |
| | | PTGYEHPKVPVFTLEDFVGDWRQTAGYNLDOVLEQGGVSSLFQNL |
| | | GVSVTPIQRIVLSGENGLKIDIHVIIPYEGLSGDQMGQIEKIFKV |
| | | VYPVDDHHFKVILHYGTLVIDGVTPNMIDYFGRPYEGIAVEDGKK |
| | | ITVTGTLWNGNKIIDERLINPDGSLLFRVTINGVTGWRLCERILA |
| | | GGGGSPSRLEEELRRRLTEP |
| UQCC2-nanoluc- | 413 | MAASRYRRELKLCEEWPVDETKRGRDLGAYLRQRVAQAFREGENT |
| alfa-tag-fusion | | QYPRPRDTSFSGLSLEEYKLILSTDTLEELKEIDKGMWKKLQEKE |
| | | APKGPEEDHKAKVPVFTLEDFVGDWRQTAGYNLDQVLEQGGVSSL |
| | | FQNLGVSVTPIQRIVLSGENGLKIDIHVIIPYEGLSGDQMGQIEK |
| | | IFKVVYPVDDHHFKVILHYGTLVIDGVTPNMIDYFGRPYEGIAVE |
| | | DGKKITVTGTLWNGNKIIDERLINPDGSLLERVTINGVTGWRLCE |
| | | RILAGGGGSPSRLEEELRRRLTEP |
| LYRM7-nanoluc- | 414 | MGRAVKVLQLFKTLHRTRQQVEKNDARALEAARIKINEEFKNNKS |
| alfa-tag-fusion | | ETSSKKIEELMKIGSDVELLLRTSVIQGIHTDHNTLKLVPRKDLL |
| | | VENVPYCDAPTQKQKVPVFTLEDFVGDWRQTAGYNLDOVLEQGGV |
| | | SSLFQNLGVSVTPIQRIVLSGENGLKIDIHVIIPYEGLSGDQMGQ |
| | | IEKIFKVVYPVDDHHFKVILHYGTLVIDGVTPNMIDYEGRPYEGI |
| | | AVFDGKKITVTGTLWNGNKIIDERLINPDGSLLFRVTINGVTGWR |
| | | LCERILAGGGGSPSRLEEELRRRLTEP |

[0230] The amino acid sequence of exemplary fusion proteins comprising a control or a targeted engineered deubiquitinase are detailed in Table 9 below.

TABLE 9
Amino Acid Sequence of exemplary enDub Control and
Screening Fusion Proteins

| Description | SEQ ID NO | Amino Acid Sequence |
|---|---|---|
| FireflyLuciferase- | 415 | MEDAKNIKKGPAPFYPLEDGTAGEQLHKAMKRYALVPGTIAFTDA |
| P2A-nano | | HIEVDITYAEYFEMSVRLAEAMKRYGLNTNHRIVVCSENSLQFFM |
| (Control) | | PVLGALFIGVAVAPANDIYNERELLNSMGISQPTVVFVSKKGLQK |
| | | ILNVQKKLPIIQKIIIMDSKTDYQGFQSMYTFVTSHLPPGENEYD |
| | | FVPESEDRDKTIALIMNSSGSTGLPKGVALPHRTACVRESHARDP |
| | | IFGNQIIPDTAILSVVPFHHGFGMFTTLGYLICGFRVVLMYRFEE |
| | | ELFLRSLQDYKIQSALLVPTLESFFAKSTLIDKYDLSNLHEIASG |
| | | GAPLSKEVGEAVAKRFHLPGIRQGYGLTETTSAILITPEGDDKPG |
| | | AVGKVVPFFEAKVVDLDTGKTLGVNQRGELCVRGPMIMSGYVNNP |
| | | EATNALIDKDGWLHSGDIAYWDEDEHFFIVDRLKSLIKYKGYQVA |
| | | PAELESILLQHPNIFDAGVAGLPDDDAGELPAAVVVLEHGKTMTE |
| | | KEIVDYVASQVTTAKKLRGGVVFVDEVPKGLTGKLDARKIREILI |
| | | KAKKGGKIAVTRLKGSGATNFSLLKQAGDVEENPGPRSGTGSSGE |
| | | VQLQESGGGLVQPGGSLRLSCTASGVTISALNAMAMGWYRQAPGE |
| | | RRVMVAAVSERGNAMYRESVQGRFTVTRDFTNKMVSLQMDNLKPE |
| | | DTAVYYCHVLEDRVDSFHDYWGQGTQVTVSS |
| FireflyLuciferase- | 416 | MEDAKNIKKGPAPFYPLEDGTAGEQLHKAMKRYALVPGTIAFTDA |
| P2A-Cezanne | | HIEVDITYAEYFEMSVRLAEAMKRYGLNTNHRIVVCSENSLQFFM |
| (Control) | | PVLGALFIGVAVAPANDIYNERELLNSMGISQPTVVFVSKKGLQK |
| | | ILNVQKKLPIIQKIIIMDSKTDYQGFQSMYTFVTSHLPPGENEYD |
| | | FVPESFDRDKTIALIMNSSGSTGLPKGVALPHRTACVRESHARDP |
| | | IFGNQIIPDTAILSVVPFHHGFGMFTTLGYLICGFRVVLMYRFEE |
| | | ELFLRSLQDYKIQSALLVPTLESFFAKSTLIDKYDLSNLHEIASG |
| | | GAPLSKEVGEAVAKRFHLPGIRQGYGLTETTSAILITPEGDDKPG |
| | | AVGKVVPFFEAKVVDLDTGKTLGVNQRGELCVRGPMIMSGYVNNP |
| | | EATNALIDKDGWLHSGDIAYWDEDEHFFIVDRLKSLIKYKGYQVA |
| | | PAELESILLQHPNIFDAGVAGLPDDDAGELPAAVVVLEHGKTMTE |
| | | KEIVDYVASQVTTAKKLRGGVVFVDEVPKGLTGKLDARKIREILI |
| | | KAKKGGKIAVTRLKGSGATNFSLLKQAGDVEENPGPRSGTGSPPS |
| | | FSEGSGGSRTPEKGFSDREPTRPPRPILQRQDDIVQEKRLSRGIS |
| | | HASSSIVSLARSHVSSNGGGGGSNEHPLEMPICAFQLPDLTVYNE |
| | | DERSFIERDLIEQSMLVALEQAGRLNWWVSVDPTSQRLLPLATTG |
| | | DGNCLLHAASLGMWGFHDRDLMLRKALYALMEKGVEKEALKRRWR |
| | | WQQTQQNKESGLVYTEDEWQKEWNELIKLASSEPRMHLGTNGANC |
| | | GGVESSEEPVYESLEEFHVFVLAHVLRRPIVVVADTMLRDSGGEA |
| | | FAPIPFGGIYLPLEVPASQCHRSPLVLAYDQAHFSALVSMEQKEN |
| | | TKEQAVIPLTDSEYKLLPLHFAVDPGKGWEWGKDDSDNVRLASVI |
| | | LSLEVKLHLLHSYMNVKWIPLSSDAQAPLAQ |
| FireflyLuciferase- | 417 | MEDAKNIKKGPAPFYPLEDGTAGEQLHKAMKRYALVPGTIAFTDA |
| P2A- | | HIEVDITYAEYFEMSVRLAEAMKRYGLNTNHRIVVCSENSLQFFM |
| a_alfatag_nano- | | PVLGALFIGVAVAPANDIYNERELLNSMGISQPTVVFVSKKGLQK |
| Cezanne | | ILNVQKKLPIIQKIIIMDSKTDYQGFQSMYTFVTSHLPPGENEYD |
| | | FVPESEDRDKTIALIMNSSGSTGLPKGVALPHRTACVRESHARDP |
| | | IFGNQIIPDTAILSVVPFHHGFGMFTTLGYLICGFRVVLMYRFEE |
| | | ELFLRSLQDYKIQSALLVPTLESFFAKSTLIDKYDLSNLHEIASG |
| | | GAPLSKEVGEAVAKRFHLPGIRQGYGLTETTSAILITPEGDDKPG |
| | | AVGKVVPFFEAKVVDLDTGKTLGVNQRGELCVRGPMIMSGYVNNP |
| | | EATNALIDKDGWLHSGDIAYWDEDEHFFIVDRLKSLIKYKGYQVA |
| | | PAELESILLQHPNIFDAGVAGLPDDDAGELPAAVVVLEHGKTMTE |
| | | KEIVDYVASQVTTAKKLRGGVVFVDEVPKGLTGKLDARKIREILI |
| | | KAKKGGKIAVTRLKGSGATNFSLLKQAGDVEENPGPRSGTGSSGE |
| | | VQLQESGGGLVQPGGSLRLSCTASGVTISALNAMAMGWYRQAPGE |
| | | RRVMVAAVSERGNAMYRESVQGRFTVTRDFTNKMVSLQMDNLKPE |
| | | DTAVYYCHVLEDRVDSFHDYWGQGTQVTVSSGAPGSGPPSFSEGS |
| | | GGSRTPEKGFSDREPTRPPRPILQRQDDIVQEKRLSRGISHASSS |
| | | IVSLARSHVSSNGGGGGSNEHPLEMPICAFQLPDLTVYNEDERSE |
| | | IERDLIEQSMLVALEQAGRLNWWVSVDPTSQRLLPLATTGDGNCL |
| | | LHAASLGMWGFHDRDLMLRKALYALMEKGVEKEALKRRWRWQQTQ |
| | | QNKESGLVYTEDEWQKEWNELIKLASSEPRMHLGTNGANCGGVES |
| | | SEEPVYESLEEFHVFVLAHVLRRPIVVVADTMLRDSGGEAFAPIP |
| | | FGGIYLPLEVPASQCHRSPLVLAYDQAHESALVSMEQKENTKEQA |
| | | VIPLTDSEYKLLPLHFAVDPGKGWEWGKDDSDNVRLASVILSLEV |
| | | KLHLLHSYMNVKWIPLSSDAQAPLAQ |

[0231] The assay was conducted with utilizing the tagged proteins and targeted enDubs described above in Tables 7 and 8. The results of the COX6A2 targeting are shown in FIG. 3, showing a 1.48-fold increase in COX6A2 protein expression. The results of the UQCC2 targeting are shown in FIG. 4, showing a 2.87-fold increase in UQCC2 protein expression. The results of the LYRM7 targeting are shown in FIG. 5, showing a 1.386-fold increase in LYRM7 protein expression. The control used for the COX6A, UQCC2, and LYRM7 experiments is the engineered deubiquitinase without the nanobody targeting the alfa-tag. Normalization of transduction efficiency was performed using the firefly luciferase signal as the reference and the ratio between NLuc signal divided by firefly luciferase signal plotted on the y axes.

[0232] The invention is not to be limited in scope by the specific embodiments described herein. Indeed, various modifications of the invention in addition to those described will become apparent to those skilled in the art from the foregoing description and accompanying figures. Such modifications are intended to fall within the scope of the appended claims.

[0233] All references (e.g., publications or patents or patent applications) cited herein are incorporated herein by reference in their entireties and for all purposes to the same extent as if each individual reference (e.g., publication or patent or patent application) was specifically and individually indicated to be incorporated by reference in its entirety for all purposes. Other embodiments are within the following claims.

The application's sequence listing, which the Patent Office published only in electronic form, follows.

SEQUENCE LISTING (419 sequences)

SEQ ID NO: 1 - protein, 438 aa, Homo sapiens
MCKDYVYDKDIEQIAKEEQGEALKLQASTSTEVSHQQCSVPGLGEKFPTWETTKPELELLGHNPRRRRITSSFTIGLRGLINLGNTCFMNCIVQALTHTPILRDFFLSDRHRCEMPSPELCLVCEMSSLFRELYSGNPSPHVPYKLLHLVWIHARHLAGYRQQDAHEFLIAALDVLHRHCKGDDVGKAANNPNHCNCIIDQIFTGGLQSDVTCQACHGVSTTIDPCWDISLDLPGSCTSFWPMSPGRESSVNGESHIPGITTLTDCLRRFTRPEHLGSSAKIKCGSCQSYQESTKQLTMNKLPVVACFHFKRFEHSAKQRRKITTYISFPLELDMTPFMASSKESRMNGQLQLPTNSGNNENKYSLFAVVNHQGTLESGHYTSFIRHHKDQWFKCDDAVITKASIKDVLDSEGYLLFYHKQVLEHESEKVKEMNTQAY

SEQ ID NO: 2 - protein, 1035 aa, Homo sapiens
MAPRLQLEKAAWRWAETVRPEEVSQEHIETAYRIWLEPCIRGVCRRNCKGNPNCLVGIGEHIWLGEIDENSFHNIDDPNCERRKKNSFVGLTNLGATCYVNTFLQVWFLNLELRQALYLCPSTCSDYMLGDGIQEEKDYEPQTICEHLQYLFALLQNSNRRYIDPSGFVKALGLDTGQQQDAQEFSKLFMSLLEDTLSKQKNPDVRNIVQQQFCGEYAYVTVCNQCGRESKLLSKFYELELNIQGHKQLTDCISEFLKEEKLEGDNRYFCENCQSKQNATRKIRLLSLPCTLNLQLMRFVFDRQTGHKKKLNTYIGFSEILDMEPYVEHKGGSYVYELSAVLIHRGVSAYSGHYIAHVKDPQSGEWYKFNDEDIEKMEGKKLQLGIEEDLAEPSKSQTRKPKCGKGTHCSRNAYMLVYRLQTQEKPNTTVQVPAFLQELVDRDNSKFEEWCIEMAEMRKQSVDKGKAKHEEVKELYQRLPAGAEPYEFVSLEWLQKWLDESTPTKPIDNHACLCSHDKLHPDKISIMKRISEYAADIFYSRYGGGPRLTVKALCKECVVERCRILRLKNQLNEDYKTVNNLLKAAVKGSDGFWVGKSSLRSWRQLALEQLDEQDGDAEQSNGKMNGSTLNKDESKEERKEEEELNFNEDILCPHGELCISENERRLVSKEAWSKLQQYFPKAPEFPSYKECCSQCKILEREGEENEALHKMIANEQKTSLPNLFQDKNRPCLSNWPEDTDVLYIVSQFFVEEWRKFVRKPTRCSPVSSVGNSALLCPHGGLMFTFASMTKEDSKLIALIWPSEWQMIQKLFVVDHVIKITRIEVGDVNPSETQYISEPKLCPECREGLLCQQQRDLREYTQATIYVHKVVDNKKVMKDSAPELNVSSSETEEDKEEAKPDGEKDPDFNQSNGGTKRQKISHQNYIAYQKQVIRRSMRHRKVRGEKALLVSANQTLKELKIQIMHAFSVAPFDQNLSIDGKILSDDCATLGTLGVIPESVILLKADEPIADYAAMDDVMQVCMPEEGFKGTGLLGH

SEQ ID NO: 3 - protein, 520 aa, Homo sapiens
MECPHLSSSVCIAPDSAKFPNGSPSSWCCSVCRSNKSPWVCLTCSSVHCGRYVNGHAKKHYEDAQVPLTNHKKSEKQDKVQHTVCMDCSSYSTYCYRCDDFVVNDTKLGLVQKVREHLQNLENSAFTADRHKKRKLLENSTLNSKLLKVNGSTTAICATGLRNLGNTCFMNAILQSLSNIEQFCCYFKELPAVELRNGKTAGRRTYHTRSQGDNNVSLVEEFRKTLCALWQGSQTAFSPESLFYVVWKIMPNFRGYQQQDAHEFMRYLLDHLHLELQGGFNGVSRSAILQENSTLSASNKCCINGASTVVTAIFGGILQNEVNCLICGTESRKFDPFLDLSLDIPSQFRSKRSKNQENGPVCSLRDCLRSFTDLEELDETELYMCHKCKKKQKSTKKFWIQKLPKVLCLHLKRFHWTAYLRNKVDTYVEFPLRGLDMKCYLLEPENSGPESCLYDLAAVVVHHGSGVGSGHYTAYATHEGRWFHFNDSTVTLTDEETVVKAKAYILFYVEHQAKAGSDKL

SEQ ID NO: 4 - protein, 470 aa, Homo sapiens
QLAPREKLPLSSRRPAAVGAGLQNMGNTCYVNASLQCLTYTPPLANYMLSREHSQTCHRHKGCMLCTMQAHITRALHNPGHVIQPSQALAAGFHRGKQEDAHEFLMFTVDAMKKACLPGHKQVDHHSKDTTLIHQIFGGYWRSQIKCLHCHGISDTFDPYLDIALDIQAAQSVQQALEQLVKPEELNGENAYHCGVCLQRAPASKTLTLHTSAKVLILVLKRFSDVTGNKIAKNVQYPECLDMQPYMSQTNTGPLVYVLYAVLVHAGWSCHNGHYFSYVKAQEGQWYKMDDAEVTASSITSVLSQQAYVLFYIQKSEWERHSESVSRGREPRALGAEDTDRRATQGELKRDHPCLQAPELDEHLVERATQESTLDHWKFLQEQNKTKPEFNVRKVEGTLPPDVLVIHQSKYKCGMKNHHPEQQSSLLNLSSTTPTHQESMNTGTLASLRGRARRSKGKNKHSKRALLVCQ

SEQ ID NO: 5 - protein, 785 aa, Homo sapiens
MPGVIPSESNGLSRGSPSKKNRLSLKFFQKKETKRALDFTDSQENEEKASEYRASEIDQVVPAAQSSPINCEKRENLLPFVGLNNLGNTCYLNSILQVLYFCPGFKSGVKHLFNIISRKKEALKDEANQKDKGNCKEDSLASYELICSLQSLIISVEQLQASFLLNPEKYTDELATQPRRLLNTLRELNPMYEGYLQHDAQEVLQCILGNIQETCQLLKKEEVKNVAELPTKVEEIPHPKEEMNGINSIEMDSMRHSEDFKEKLPKGNGKRKSDTEFGNMKKKVKLSKEHQSLEENQRQTRSKRKATSDTLESPPKIIPKYISENESPRPSQKKSRVKINWLKSATKQPSILSKFCSLGKITTNQGVKGQSKENECDPEEDLGKCESDNTTNGCGLESPGNTVTPVNVNEVKPINKGEEQIGFELVEKLFQGQLVLRTRCLECESLTERREDFQDISVPVQEDELSKVEESSEISPEPKTEMKTLRWAISQFASVERIVGEDKYFCENCHHYTEAERSLLFDKMPEVITIHLKCFAASGLEFDCYGGGLSKINTPLLTPLKLSLEEWSTKPTNDSYGLFAVVMHSGITISSGHYTASVKVTDLNSLELDKGNFVVDQMCEIGKPEPLNEEEARGVVENYNDEEVSIRVGGNTQPSKVLNKKNVEAIGLLGGQKSKADYELYNKASNPDKVASTAFAENRNSETSDTTGTHESDRNKESSDQTGINISGFENKISYVVQSLKEYEGKWLLFDDSEVKVTEEKDFLNSLSPSTSPTSTPYLLFYKKL

SEQ ID NO: 6 - protein, 1235 aa, Homo sapiens
MFGDLFEEEYSTVSNNQYGKGKKLKTKALEPPAPREFTNLSGIRNQGGTCYLNSLLQTLHFTPEFREALFSLGPEELGLFEDKDKPDAKVRIIPLQLQRLFAQLLLLDQEAASTADLTDSFGWTSNEEMRQHDVQELNRILFSALETSLVGTSGHDLIYRLYHGTIVNQIVCKECKNVSERQEDFLDLTVAVKNVSGLEDALWNMYVEEEVFDCDNLYHCGTCDRLVKAAKSAKLRKLPPFLTVSLLRFNFDFVKCERYKETSCYTFPLRINLKPFCEQSELDDLEYIYDLFSVIIHKGGCYGGHYHVYIKDVDHLGNWQFQEEKSKPDVNLKDLQSEEEIDHPLMILKAILLEENNLIPVDQLGQKLLKKIGISWNKKYRKQHGPLRKFLQLHSQIFLLSSDESTVRLLKNSSLQAESDFQRNDQQIFKMLPPESPGLNNSISCPHWFDINDSKVQPIREKDIEQQFQGKESAYMLFYRKSQLQRPPEARANPRYGVPCHLLNEMDAANIELQTKRAECDSANNTFELHLHLGPQYHFFNGALHPVVSQTESVWDLTFDKRKTLGDLRQSIFQLLEFWEGDMVLSVAKLVPAGLHIYQSLGGDELTLCETEIADGEDIFVWNGVEVGGVHIQTGIDCEPLLLNVLHLDTSSDGEKCCQVIESPHVFPANAEVGTVLTALAIPAGVIFINSAGCPGGEGWTAIPKEDMRKTFREQGLRNGSSILIQDSHDDNSLLTKEEKWVTSMNEIDWLHVKNLCQLESEEKQVKISATVNTMVFDIRIKAIKELKLMKELADNSCLRPIDRNGKLLCPVPDSYTLKEAELKMGSSLGLCLGKAPSSSQLFLFFAMGSDVQPGTEMEIVVEETISVRDCLKLMLKKSGLQGDAWHLRKMDWCYEAGEPLCEEDATLKELLICSGDTLLLIEGQLPPLGFLKVPIWWYQLQGPSGHWESHQDQTNCTSSWGRVWRATSSQGASGNEPAQVSLLYLGDIEISEDATLAELKSQAMTLPPFLEFGVPSPAHLRAWTVERKRPGRLLRTDRQPLREYKLGRRIEICLEPLQKGENLGPQDVLLRTQVRIPGERTYAPALDLVWNAAQGGTAGSLRQRVADFYRLPVEKIEIAKYFPEKFEWLPISSWNQQITKRKKKKKQDYLQGAPYYLKDGDTIGVKNLLIDDDDDFSTIRDDTGKEKQKQRALGRRKSQEALHEQSSYILSSAETPARPRAPETSLSIHVGSFR

SEQ ID NO: 7 - protein, 1102 aa, Homo sapiens
MNHQQQQQQQKAGEQQLSEPEDMEMEAGDTDDPPRITQNPVINGNVALSDGHNTAEEDMEDDTSWRSEATFQFTVERFSRLSESVLSPPCFVRNLPWKIMVMPRFYPDRPHQKSVGFFLQCNAESDSTSWSCHAQAVLKIINYRDDEKSFSRRISHLFFHKENDWGFSNFMAWSEVTDPEKGFIDDDKVTFEVFVQADAPHGVAWDSKKHTGYVGLKNQGATCYMNSLLQTLFFTNQLRKAVYMMPTEGDDSSKSVPLALQRVFYELQHSDKPVGTKKLTKSFGWETLDSFMQHDVQELCRVLLDNVENKMKGTCVEGTIPKLFRGKMVSYIQCKEVDYRSDRREDYYDIQLSIKGKKNIFESFVDYVAVEQLDGDNKYDAGEHGLQEAEKGVKFLTLPPVLHLQLMRFMYDPQTDQNIKINDRFEFPEQLPLDEFLQKTDPKDPANYILHAVLVHSGDNHGGHYVVYLNPKGDGKWCKFDDDVVSRCTKEEAIEHNYGGHDDDLSVRHCTNAYMLVYIRESKLSEVLQAVTDHDIPQQLVERLQEEKRIEAQKRKERQEAHLYMQVQIVAEDQFCGHQGNDMYDEEKVKYTVFKVLKNSSLAEFVQSLSQTMGFPQDQIRLWPMQARSNGTKRPAMLDNEADGNKTMIELSDNENPWTIFLETVDPELAASGATLPKFDKDHDVMLFLKMYDPKTRSLNYCGHIYTPISCKIRDLLPVMCDRAGFIQDTSLILYEEVKPNLTERIQDYDVSLDKALDELMDGDIIVFQKDDPENDNSELPTAKEYFRDLYHRVDVIFCDKTIPNDPGFVVTLSNRMNYFQVAKTVAQRLNTDPMLLQFFKSQGYRDGPGNPLRHNYEGTLRDLLQFFKPRQPKKLYYQQLKMKITDFENRRSFKCIWLNSQFREEEITLYPDKHGCVRDLLEECKKAVELGEKASGKLRLLEIVSYKIIGVHQEDELLECLSPATSRTFRIEEIPLDQVDIDKENEMLVTVAHFHKEVFGTFGIPFLLRIHQGEHFREVMKRIQSLLDIQEKEFEKFKFAIVMMGRHQYINEDEYEVNLKDFEPQPGNMSHPRPWLGLDHFNKAPKRSRYTYLEKAIKIHN

SEQ ID NO: 8 - protein, 530 aa, Homo sapiens
MEDDSLYLRGEWQFNHFSKLTSSRPDAAFAEIQRTSLPEKSPLSCETRVDLCDDLAPVARQLAPREKLPLSSRRPAAVGAGLQNMGNTCYVNASLQCLTYTPPLANYMLSREHSQTCHRHKGCMLCTMQAHITRALHNPGHVIQPSQALAAGFHRGKQEDAHEFLMFTVDAMKKACLPGHKQVDHHSKDTTLIHQIFGGYWRSQIKCLHCHGISDTFDPYLDIALDIQAAQSVQQALEQLAKPEELNGENAYHCGVCLQRAPASKTLTLHTSAKVLILVLKRFSDVTGNKIAKNVQYPECLDMQPYMSQPNTGPLVYVLYAVLVHAGWSCHNGHYFSYVKAQEGQWYKMDDAEVTASSITSVLSQQAYVLFYIQKSEWERHSESVSRGREPRALGAEDTDRRATQGELKRDHPCLQAPELDEHLVERATQESTLDHWKFLQEQNKTKPEFNVRKVEGTLPPDVLVIHQSKYKCGMKNHHPEQQSSLLNLSSSTPTHQESMNTGTLASLRGRARRSKGKNKHSKRALLVCQ

SEQ ID NO: 9 - protein, 530 aa, Homo sapiens
MEEDSLYLGGEWQFNHFSKLTSSRPDAAFAEIQRTSLPEKSPLSCETRVDLCDDLAPVARQLAPREKLPLSNRRPAAVGAGLQNMGNTCYVNASLQCLTYTPPLANYMLSREHSQTCHRHKGCMLCTMQAHITRALHNPGHVIQPSQALAAGFHRGKQEDAHEFLMFTVDAMKKACLPGHKQVDHHSKDTTLIHQIFGGYWRSQIKCLHCHGISDTFDPYLDIALDIQAAQSVQQALEQLVKPEELNGENAYHCGVCLQRAPASKMLTLLTSAKVLILVLKRFSDVTGNKIAKNVQYPECLDMQPYMSQPNTGPLVYVLYAVLVHAGWSCHNGHYFSYVKAQEGQWYKMDDAEVTASSITSVLSQQAYVLFYIQKSEWERHSESVSRGREPRALGAEDTDRRATQGELKRDHPCLQAPELDEHLVERATQESTLDHWKFLQEQNKTKPEFNVRKVEGTLPPDVLVIHQSKYKCGMKNHHPEQQSSLLNLSSSTPTHQESMNTGTLASLRGRARRSKGKNKHSKRALLVCQ

SEQ ID NO: 10 - protein, 530 aa, Homo sapiens
MEDDSLYLGGEWQFNHFSKLTSSRPDAAFAEIQRTSLPEKSPLSCETRVDLCDDLAPVARQLAPREKPPLSSRRPAAVGAGLQNMGNTCYVNASLQCLTYKPPLANYMLFREHSQTCHRHKGCMLCTMQAHITRALHIPGHVIQPSQALAAGFHRGKQEDAHEFLMFTVDAMRKACLPGHKQVDRHSKDTTLIHQIFGGYWRSQIKCLHCHGISDTFDPYLDIALDIQAAQSVQQALEQLVKPEELNGENAYHCGVCLQRAPASKTLTLHNSAKVLILVLKRFPDVTGNKIAKNVQYPECLDMQPYMSQQNTGPLVYVLYAVLVHAGWSCHNGHYSSYVKAQEGQWYKMDDAEVTASSITSVLSQQAYVLFYIQKSEWERHSESVSRGREPRALGVEDTDRRATQGELKRDHPCLQAPELDEHLVERATQESTLDHWKFLQEQNKTKPEFNVRRVEGTVPPDVLVIHQSKYKCRMKNHHPEQQSSLLNLSSTTPTDQESMNTGTLASLRGRTRRSKGKNKHSKRALLVCQ

SEQ ID NO: 11 - protein, 358 aa, Homo sapiens
MDGVLFRAHQCQYVHPCVHVYVTVGLMDPLCERKEKASKQERENPLAHLAAWGLVGLHNIGQTCCLNSLIQVFVMNVDFARILKRITVPRGADEQRRSVPFQMLLLLEKMQDSRQKAVWPLELAYCLQKYNVPLFVQHDAAQLYLKLWNLIKDQIADVHLVERLQALYMIRMKDSLICLDCAMESSRNSSMLTLRLSFFDVDSKPLKTLEDALHCFFQPRELSSKSKCFCENCGKKTRGKQVLKLTHLPQTLTIHLMRFSIRNSQTRKICHSLYFPQSLDFSQILPMKRESCDAEEQSGGQYELFAVIAHVGMADSGHYCVYIRNAVDGKWFCFNDSNICLVSWEDIQCTYGNPNYHW

SEQ ID NO: 12 - protein, 1042 aa, Homo sapiens
MDKILEGLVSSSHPLPLKRVIVRKVVESAEHWLDEAQCEAMFDLTTRLILEGQDPFQRQVGHQVLEAYARYHRPEFESFFNKTFVLGLLHQGYHSLDRKDVAILDYIHNGLKLIMSCPSVLDLFSLLQVEVLRMVCERPEPQLCARLSDLLTDFVQCIPKGKLSITFCQQLVRTIGHFQCVSTQERELREYVSQVTKVSNLLQNIWKAEPATLLPSLQEVFASISSTDASFEPSVALASLVQHIPLQMITVLIRSLTTDPNVKDASMTQALCRMIDWLSWPLAQHVDTWVIALLKGLAAVQKFTILIDVTLLKIELVFNRLWFPLVRPGALAVLSHMLLSFQHSPEAFHLIVPHVVNLVHSFKNDGLPSSTAFLVQLTELIHCMMYHYSGFPDLYEPILEAIKDFPKPSEEKIKLILNQSAWTSQSNSLASCLSRLSGKSETGKTGLINLGNTCYMNSVIQALFMATDFRRQVLSLNLNGCNSLMKKLQHLFAFLAHTQREAYAPRIFFEASRPPWFTPRSQQDCSEYLRFLLDRLHEEEKILKVQASHKPSEILECSETSLQEVASKAAVLTETPRTSDGEKTLIEKMFGGKLRTHIRCLNCRSTSQKVEAFTDLSLAFCPSSSLENMSVQDPASSPSIQDGGLMQASVPGPSEEPVVYNPTTAAFICDSLVNEKTIGSPPNEFYCSENTSVPNESNKILVNKDVPQKPGGETTPSVTDLLNYFLAPEILTGDNQYYCENCASLQNAEKTMQITEEPEYLILTLLRFSYDQKYHVRRKILDNVSLPLVLELPVKRITSFSSLSESWSVDVDFTDLSENLAKKLKPSGTDEASCTKLVPYLLSSVVVHSGISSESGHYYSYARNITSTDSSYQMYHQSEALALASSQSHLLGRDSPSAVFEQDLENKEMSKEWFLFNDSRVTFTSFQSVQKITSRFPKDTAYVLLYKKQHSTNGLSGNNPTSGLWINGDPPLQKELMDAITKDNKLYLQEQELNARARALQAASASCSFRPNGFDDNDPPGSCGPTGGGGGGGFNTVGRLVF

SEQ ID NO: 13 - protein, 1123 aa, Homo sapiens
MDLGPGDAAGGGPLAPRPRRRRSLRRLFSRFLLALGSRSRPGDSPPRPQPGHCDGDGEGGFACAPGPVPAAPGSPGEERPPGPQPQLQLPAGDGARPPGAQGLKNHGNTCFMNAVVQCLSNTDLLAEFLALGRYRAAPGRAEVTEQLAALVRALWTREYTPQLSAEFKNAVSKYGSQFQGNSQHDALEFLLWLLDRVHEDLEGSSRGPVSEKLPPEATKTSENCLSPSAQLPLGQSFVQSHFQAQYRSSLTCPHCLKQSNTFDPFLCVSLPIPLRQTRFLSVTLVFPSKSQRFLRVGLAVPILSTVAALRKMVAEEGGVPADEVILVELYPSGFQRSFFDEEDLNTIAEGDNVYAFQVPPSPSQGTLSAHPLGLSASPRLAAREGQRFSLSLHSESKVLILFCNLVGSGQQASRFGPPFLIREDRAVSWAQLQQSILSKVRHLMKSEAPVQNLGSLFSIRVVGLSVACSYLSPKDSRPLCHWAVDRVLHLRRPGGPPHVKLAVEWDSSVKERLFGSLQEERAQDADSVWQQQQAHQQHSCTLDECFQFYTKEEQLAQDDAWKCPHCQVLQQGMVKLSLWTLPDILIIHLKRFCQVGERRNKLSTLVKFPLSGLNMAPHVAQRSTSPEAGLGPWPSWKQPDCLPTSYPLDFLYDLYAVCNHHGNLQGGHYTAYCRNSLDGQWYSYDDSTVEPLREDEVNTRGAYILFYQKRNSIPPWSASSSMRGSTSSSLSDHWLLRLGSHAGSTRGSLLSWSSAPCPSLPQVPDSPIFTNSLCNQEKGGLEPRRLVRGVKGRSISMKAPTTSRAKQGPFKTMPLRWSFGSKEKPPGASVELVEYLESRRRPRSTSQSIVSLLTGTAGEDEKSASPRSNVALPANSEDGGRAIERGPAGVPCPSAQPNHCLAPGNSDGPNTARKLKENAGQDIKLPRKFDLPLTVMPSVEHEKPARPEGQKAMNWKESFQMGSKSSPPSPYMGFSGNSKDSRRGTSELDRPLQGTLTLLRSVFRKKENRRNERAEVSPQVPPVSLVSGGLSPAMDGQAPGSPPALRIPEGLARGLGSRLERDVWSAPSSLRLPRKASRAPRGSALGMSQRTVPGEQASYGTFQRVKYHTLSLGRKKTLPESSF

SEQ ID NO: 14 - protein, 605 aa, Homo sapiens
MSQLSSTLKRYTESARYTDAHYAKSGYGAYTPSSYGANLAASLLEKEKLGFKPVPTSSFLTRPRTYGPSSLLDYDRGRPLLRPDITGGGKRAESQTRGTERPLGSGLSGGSGFPYGVTNNCLSYLPINAYDQGVTLTQKLDSQSDLARDFSSLRTSDSYRIDPRNLGRSPMLARTRKELCTLQGLYQTASCPEYLVDYLENYGRKGSASQVPSQAPPSRVPEIISPTYRPIGRYTLWETGKGQAPGPSRSSSPGRDGMNSKSAQGLAGLRNLGNTCFMNSILQCLSNTRELRDYCLQRLYMRDLHHGSNAHTALVEEFAKLIQTIWTSSPNDVVSPSEFKTQIQRYAPRFVGYNQQDAQEFLRFLLDGLHNEVNRVTLRPKSNPENLDHLPDDEKGRQMWRKYLEREDSRIGDLFVGQLKSSLTCTDCGYCSTVFDPFWDLSLPIAKRGYPEVTLMDCMRLFTKEDVLDGDEKPTCCRCRGRKRCIKKFSIQRFPKILVLHLKRFSESRIRTSKLTTFVNFPLRDLDLREFASENTNHAVYNLYAVSNHSGTTMGGHYTAYCRSPGTGEWHTFNDSSVTPMSSSQVRTSDAYLLFYELASPPSRM

SEQ ID NO: 15 - protein, 814 aa, Homo sapiens
MRVKDPTKALPEKAKRSKRPTVPHDEDSSDDIAVGLTCQHVSHAISVNHVKRAIAENLWSVCSECLKERRFYDGQLVLTSDIWLCLKCGFQGCGKNSESQHSLKHFKSSRTEPHCIIINLSTWIIWCYECDEKLSTHCNKKVLAQIVDFLQKHASKTQTSAFSRIMKLCEEKCETDEIQKGGKCRNLSVRGITNLGNTCFFNAVMQNLAQTYTLTDLMNEIKESSTKLKIFPSSDSQLDPLVVELSRPGPLTSALFLFLHSMKETEKGPLSPKVLFNQLCQKAPRFKDFQQQDSQELLHYLLDAVRTEETKRIQASILKAFNNPTTKTADDETRKKVKAYGKEGVKMNFIDRIFIGELTSTVMCEECANISTVKDPFIDISLPIIEERVSKPLLWGRMNKYRSLRETDHDRYSGNVTIENIHQPRAAKKHSSSKDKSQLIHDRKCIRKLSSGETVTYQKNENLEMNGDSLMFASLMNSESRLNESPTDDSEKEASHSESNVDADSEPSESESASKQTGLFRSSSGSGVQPDGPLYPLSAGKLLYTKETDSGDKEMAEAISELRLSSTVTGDQDFDRENQPLNISNNLCFLEGKHLRSYSPQNAFQTLSQSYITTSKECSIQSCLYQFTSMELLMGNNKLLCENCTKNKQKYQEETSFAEKKVEGVYTNARKQLLISAVPAVLILHLKRFHQAGLSLRKVNRHVDFPLMLDLAPFCSATCKNASVGDKVLYGLYGIVEHSGSMREGHYTAYVKVRTPSRKLSEHNTKKKNVPGLKAADNESAGQWVHVSDTYLQVVPESRALSAQAYLLFYERVL

SEQ ID NO: 16 - protein, 1604 aa, Homo sapiens
MGAKESRIGFLSYEEALRRVTDVELKRLKDAFKRTCGLSYYMGQHCFIREVLGDGVPPKVAEVIYCSFGGTSKGLHFNNLIVGLVLLTRGKDEEKAKYIFSLFSSESGNYVIREEMERMLHVVDGKVPDTLRKCFSEGEKVNYEKFRNWLFLNKDAFTFSRWLLSGGVYVTLTDDSDTPTFYQTLAGVTHLEESDIIDLEKRYWLLKAQSRTGRFDLETFGPLVSPPIRPSLSEGLFNAFDENRDNHIDFKEISCGLSACCRGPLAERQKFCFKVFDVDRDGVLSRVELRDMVVALLEVWKDNRTDDIPELHMDLSDIVEGILNAHDTTKMGHLTLEDYQIWSVKNVLANEFLNLLFQVCHIVLGLRPATPEEEGQIIRGWLERESRYGLQAGHNWFIISMQWWQQWKEYVKYDANPVVIEPSSVLNGGKYSFGTAAHPMEQVEDRIGSSLSYVNTTEEKFSDNISTASEASETAGSGFLYSATPGADVCFARQHNTSDNNNQCLLGANGNILLHLNPQKPGAIDNQPLVTQEPVKATSLTLEGGRLKRTPQLIHGRDYEMVPEPVWRALYHWYGANLALPRPVIKNSKTDIPELELFPRYLLFLRQQPATRTQQSNIWVNMGNVPSPNAPLKRVLAYTGCFSRMQTIKEIHEYLSQRLRIKEEDMRLWLYNSENYLTLLDDEDHKLEYLKIQDEQHLVIEVRNKDMSWPEEMSFIANSSKIDRHKVPTEKGATGLSNLGNTCFMNSSIQCVSNTQPLTQYFISGRHLYELNRTNPIGMKGHMAKCYGDLVQELWSGTQKNVAPLKLRWTIAKYAPRFNGFQQQDSQELLAFLLDGLHEDLNRVHEKPYVELKDSDGRPDWEVAAEAWDNHLRRNRSIVVDLFHGQLRSQVKCKTCGHISVRFDPFNFLSLPLPMDSYMHLEITVIKLDGTTPVRYGLRLNMDEKYTGLKKQLSDLCGLNSEQILLAEVHGSNIKNFPQDNQKVRLSVSGFLCAFEIPVPVSPISASSPTQTDFSSSPSTNEMFTLTTNGDLPRPIFIPNGMPNTVVPCGTEKNFTNGMVNGHMPSLPDSPFTGYIIAVHRKMMRTELYFLSSQKNRPSLFGMPLIVPCTVHTRKKDLYDAVWIQVSRLASPLPPQEASNHAQDCDDSMGYQYPFTLRVVQKDGNSCAWCPWYRFCRGCKIDCGEDRAFIGNAYIAVDWDPTALHLRYQTSQERVVDEHESVEQSRRAQAEPINLDSCLRAFTSEEELGENEMYYCSKCKTHCLATKKLDLWRLPPILIIHLKRFQFVNGRWIKSQKIVKFPRESFDPSAFLVPRDPALCQHKPLTPQGDELSEPRILAREVKKVDAQSSAGEEDVLLSKSPSSLSANIISSPKGSPSSSRKSGTSCPSSKNSSPNSSPRTLGRSKGRLRLPQIGSKNKLSSSKENLDASKENGAGQICELADALSRGHVLGGSQPELVTPQDHEVALANGFLYEHEACGNGYSNGQLGNHSEEDSTDDQREDTRIKPIYNLYAISCHSGILGGGHYVTYAKNPNCKWYCYNDSSCKELHPDEIDTDSAYILFYEQQGIDYAQFLPKTDGKKMADTSSMDEDFESDYKKYCVLQ

SEQ ID NO: 17 - protein, 398 aa, Homo sapiens
MEDDSLYLRGEWQFNHFSKLTSSRPDAAFAEIQRTSLPEKSPLSCETRVDLCDDLAPVARQLAPREKLPLSSRRPAAVGAGLQNMGNTCYVNASLQCLTYTPPLANYMLSREHSQTCHRHKGCMLCTMQAHITRALHNPGHVIQPSQALAAGFHRGKQEDAHEFLMFTVDAMKKACLPGHKQVDHHSKDTTLIHQIFGGYWRSQIKCLHCHGISDTFDPYLDIALDIQAAQSVQQALEQLVKPEELNGENAYHCGVCLQRAPASKTLTLHTSAKVLILVLKRFSDVTGNKIAKNVQYPECLDMQPYMSQQNTGPLVYVLYAVLVHAGWSCHNGHYFSYVKAQEGQWYKMDDAEVTASSITSVLSQQAYVLFYIQKSEWERHSESVSRGREPRALGSED

SEQ ID NO: 18 - protein, 1324 aa, Homo sapiens
MTIVDKASESSDPSAYQNQPGSSEAVSPGDMDAGSASWGAVSSLNDVSNHTLSLGPVPGAVVYSSSSVPDKSKPSPQKDQALGDGIAPPQKVLFPSEKICLKWQQTHRVGAGLQNLGNTCFANAALQCLTYTPPLANYMLSHEHSKTCHAEGFCMMCTMQAHITQALSNPGDVIKPMFVINEMRRIARHFRFGNQEDAHEFLQYTVDAMQKACLNGSNKLDRHTQATTLVCQIFGGYLRSRVKCLNCKGVSDTFDPYLDITLEIKAAQSVNKALEQFVKPEQLDGENSYKCSKCKKMVPASKRFTIHRSSNVLTLSLKRFANFTGGKIAKDVKYPEYLDIRPYMSQPNGEPIVYVLYAVLVHTGFNCHAGHYFCYIKASNGLWYQMNDSIVSTSDIRSVLSQQAYVLFYIRSHDVKNGGELTHPTHSPGQSSPRPVISQRVVTNKQAAPGFIGPQLPSHMIKNPPHLNGTGPLKDTPSSSMSSPNGNSSVNRASPVNASASVQNWSVNRSSVIPEHPKKQKITISIHNKLPVRQCQSQPNLHSNSLENPTKPVPSSTITNSAVQSTSNASTMSVSSKVTKPIPRSESCSQPVMNGKSKLNSSVLVPYGAESSEDSDEESKGLGKENGIGTIVSSHSPGQDAEDEEATPHELQEPMTLNGANSADSDSDPKENGLAPDGASCQGQPALHSENPFAKANGLPGKLMPAPLLSLPEDKILETFRLSNKLKGSTDEMSAPGAERGPPEDRDAEPQPGSPAAESLEEPDAAAGLSSTKKAPPPRDPGTPATKEGAWEAMAVAPEEPPPSAGEDIVGDTAPPDLCDPGSLTGDASPLSQDAKGMIAEGPRDSALAEAPEGLSPAPPARSEEPCEQPLLVHPSGDHARDAQDPSQSLGAPEAAERPPAPVLDMAPAGHPEGDAEPSPGERVEDAAAPKAPGPSPAKEKIGSLRKVDRGHYRSRRERSSSGEPARESRSKTEGHRHRRRRTCPRERDRQDRHAPEHHPGHGDRLSPGERRSLGRCSHHHSRHRSGVELDWVRHHYTEGERGWGREKFYPDRPRWDRCRYYHDRYALYAARDWKPFHGGREHERAGLHERPHKDHNRGRRGCEPARERERHRPSSPRAGAPHALAPHPDRFSHDRTALVAGDNCNLSDRFHEHENGKSRKRRHDSVENSDSHVEKKARRSEQKDPLEEPKAKKHKKSKKKKKSKDKHRDRDSRHQQDSDLSAACSDADLHRHKKKKKKKKRHSRKSEDFVKDSELHLPRVTSLETVAQFRRAQGGFPLSGGPPLEGVGPFREKTKHLRMESRDDRCRLFEYGQGKRRYLELGR

SEQ ID NO: 19 - protein, 530 aa, Homo sapiens
MEDDSLYLGGDWQFNHFSKLTSSRLDAAFAEIQRTSLSEKSPLSSETRFDLCDDLAPVARQLAPREKLPLSSRRPAAVGAGLQKIGNTFYVNVSLQCLTYTLPLSNYMLSREDSQTCHLHKCCMFCTMQAHITWALHSPGHVIQPSQVLAAGFHRGEQEDAHEFLMFTVDAMKKACLPGHKQLDHHSKDTTLIHQIFGAYWRSQIKYLHCHGVSDTFDPYLDIALDIQAAQSVKQALEQLVKPKELNGENAYHCGLCLQKAPASKTLTLPTSAKVLILVLKRFSDVTGNKLAKNVQYPKCRDMQPYMSQQNTGPLVYVLYAVLVHAGWSCHNGHYFSYVKAQEGQWYKMDDAEVTASGITSVLSQQAYVLFYIQKSEWERHSESVSRGREPRALGAEDTDRPATQGELKRDHPCLQVPELDEHLVERATQESTLDHWKFPQEQNKTKPEFNVRKVEGTLPPNVLVIHQSKYKCGMKNHHPEQQSSLLNLSSTKPTDQESMNTGTLASLQGSTRRSKGNNKHSKRSLLVCQ

SEQ ID NO: 20 - protein, 530 aa, Homo sapiens
MEDDSLYLGGEWQFNHFSKLTSSRPDAAFAEIQRTSLPEKSPLSCETRVDLCDDLAPVARQLAPREKLPLSSRRPAAVGAGLQNMGNTCYVNASLQCLTYTPPLANYMLSREHSQTCHRHKGCMLCTMQAHITRALHNPGHVIQPSQALAAGFHRGKQEDAHEFLMFTVDAMKKACLPGHKQVDHHSKDTTLIHQIFGGYWRSQIKCLHCHGISDTFDPYLDIALDIQAAQSVQQALEQLVKPEELNGENAYHCGVCLQRAPASKTLTLHTSAKVLILVLKRFSDVTGNKIAKNVQYPECLDMQPYMSQQNTGPLVYVLYAVLVHAGWSCHNGHYFSYVKAQEGQWYKMDDAEVTAASITSVLSQQAYVLFYIQKSEWERHSESVSRGREPRALGAEDTDRRATQGELKRDHPCLQAPELDEHLVERATQESTLDHWKFLQEQNKTKPEFNVRKVEGTLPPDVLVIHQSKYKCGMKNHHPEQQSSLLNLSSSTPTHQESMNTGTLASLRGRARRSKGKNKHSKRALLVCQ

SEQ ID NO: 21 - protein, 863 aa, Homo sapiens
MQRRGALFGMPGGSGGRKMAAGDIGELLVPHMPTIRVPRSGDRVYKNECAFSYDSPNSEGGLYVCMNTFLAFGREHVERHFRKTGQSVYMHLKRHVREKVRGASGGALPKRRNSKIFLDLDTDDDLNSDDYEYEDEAKLVIFPDHYEIALPNIEELPALVTIACDAVLSSKSPYRKQDPDTWENELPVSKYANNLTQLDNGVRIPPSGWKCARCDLRENLWLNLTDGSVLCGKWFFDSSGGNGHALEHYRDMGYPLAVKLGTITPDGADVYSFQEEEPVLDPHLAKHLAHFGIDMLHMHGTENGLQDNDIKLRVSEWEVIQESGTKLKPMYGPGYTGLKNLGNSCYLSSVMQAIFSIPEFQRAYVGNLPRIFDYSPLDPTQDFNTQMTKLGHGLLSGQYSKPPVKSELIEQVMKEEHKPQQNGISPRMFKAFVSKSHPEFSSNRQQDAQEFFLHLVNLVERNRIGSENPSDVFRFLVEERIQCCQTRKVRYTERVDYLMQLPVAMEAATNKDELIAYELTRREAEANRRPLPELVRAKIPFSACLQAFSEPENVDDFWSSALQAKSAGVKTSRFASFPEYLVVQIKKFTFGLDWVPKKFDVSIDMPDLLDINHLRARGLQPGEEELPDISPPIVIPDDSKDRLMNQLIDPSDIDESSVMQLAEMGFPLEACRKAVYFTGNMGAEVAFNWIIVHMEEPDFAEPLTMPGYGGAASAGASVFGASGLDNQPPEEIVAIITSMGFQRNQAIQALRATNNNLERALDWIFSHPEFEEDSDFVIEMENNANANIISEAKPEGPRVKDGSGTYELFAFISHMGTSTMSGHYICHIKKEGRWVIYNDHKVCASERPPKDLGYMYFYRRIPS

SEQ ID NO: 22 - protein, 963 aa, Homo sapiens
MAVAPRLFGGLCFRFRDQNPEVAVEGRLPISHSCVGCRRERTAMATVAANPAAAAAAVAAAAAVTEDREPQHEELPGLDSQWRQIENGESGRERPLRAGESWFLVEKHWYKQWEAYVQGGDQDSSTFPGCINNATLFQDEINWRLKEGLVEGEDYVLLPAAAWHYLVSWYGLEHGQPPIERKVIELPNIQKVEVYPVELLLVRHNDLGKSHTVQFSHTDSIGLVLRTARERFLVEPQEDTRLWAKNSEGSLDRLYDTHITVLDAALETGQLIIMETRKKDGTWPSAQLHVMNNNMSEEDEDFKGQPGICGLTNLGNTCFMNSALQCLSNVPQLTEYFLNNCYLEELNFRNPLGMKGEIAEAYADLVKQAWSGHHRSIVPHVFKNKVGHFASQFLGYQQHDSQELLSFLLDGLHEDLNRVKKKEYVELCDAAGRPDQEVAQEAWQNHKRRNDSVIVDTFHGLFKSTLVCPDCGNVSVTFDPFCYLSVPLPISHKRVLEVFFIPMDPRRKPEQHRLVVPKKGKISDLCVALSKHTGISPERMMVADVFSHRFYKLYQLEEPLSSILDRDDIFVYEVSGRIEAIEGSREDIVVPVYLRERTPARDYNNSYYGLMLFGHPLLVSVPRDRFTWEGLYNVLMYRLSRYVTKPNSDDEDDGDEKEDDEEDKDDVPGPSTGGSLRDPEPEQAGPSSGVTNRCPFLLDNCLGTSQWPPRRRRKQLFTLQTVNSNGTSDRTTSPEEVHAQPYIAIDWEPEMKKRYYDEVEAEGYVKHDCVGYVMKKAPVRLQECIELFTTVETLEKENPWYCPSCKQHQLATKKLDLWMLPEILIIHLKRFSYTKFSREKLDTLVEFPIRDLDFSEFVIQPQNESNPELYKYDLIAVSNHYGGMRDGHYTTFACNKDSGQWHYFDDNSVSPVNENQIESKAAYVLFYQRQDVARRLLSPAGSSGAPASPACSSPPSSEFMDVN

SEQ ID NO: 23 - protein, 530 aa, Homo sapiens
MGDDSLYLGGEWQFNHFSKLTSSRPDAAFAEIQRTSLPEKSPLSSETRVDLCDDLAPVARQLAPREKLPLSSRRPAAVGAGLQNMGNTCYENASLQCLTYTLPLANYMLSREHSQTCQRPKCCMLCTMQAHITWALHSPGHVIQPSQALAAGFHRGKQEDVHEFLMFTVDAMKKACLPGHKQVDHHCKDTTLIHQIFGGCWRSQIKCLHCHGISDTFDPYLDIALDIQAAQSVKQALEQLVKPEELNGENAYHCGLCLQRAPASNTLTLHTSAKVLILVLKRFSDVAGNKLAKNVQYPECLDMQPYMSQQNTGPLVYVLYAVLVHAGWSCHDGHYFSYVKAQEVQWYKMDDAEVTVCSIISVLSQQAYVLFYIQKSEWERHSESVSRGREPRALGAEDTDRRAKQGELKRDHPCLQAPELDEHLVERATQESTLDHWKFLQEQNKTKPEFNVGKVEGTLPPNALVIHQSKYKCGMKNHHPEQQSSLLNLSSTTRTDQESMNTGTLASLQGRTRRAKGKNKHSKRALLVCQ

SEQ ID NO: 24 - protein, 494 aa, Homo sapiens
MPLYSVTVKWGKEKFEGVELNTDEPPMVFKAQLFALTGVQPARQKVMVKGGTLKDDDWGNIKIKNGMTLLMMGSADALPEEPSAKTVFVEDMTEEQLASAMELPCGLTNLGNTCYMNATVQCIRSVPELKDALKRYAGALRASGEMASAQYITAALRDLFDSMDKTSSSIPPIILLQFLHMAFPQFAEKGEQGQYLQQDANECWIQMMRVLQQKLEAIEDDSVKETDSSSASAATPSKKKSLIDQFFGVEFETTMKCTESEEEEVTKGKENQLQLSCFINQEVKYLFTGLKLRLQEEITKQSPTLQRNALYIKSSKISRLPAYLTIQMVRFFYKEKESVNAKVLKDVKFPLMLDMYELCTPELQEKMVSFRSKFKDLEDKKVNQQPNTSDKKSSPQKEVKYEPFSFADDIGSNNCGYYDLQAVLTHQGRSSSSGHYVSWVKRKQDEWIKFDDDKVSIVTPEDILRLSGGGDWHIAYVLLYGPRRVEIMEEESEQ

SEQ ID NO: 25 - protein, 963 aa, Homo sapiens
MAEGGGCRERPDAETQKSELGPLMRTTLQRGAQWYLIDSRWFKQWKKYVGFDSWDMYNVGEHNLFPGPIDNSGLFSDPESQTLKEHLIDELDYVLVPTEAWNKLLNWYGCVEGQQPIVRKVVEHGLFVKHCKVEVYLLELKLCENSDPTNVLSCHFSKADTIATIEKEMRKLFNIPAERETRLWNKYMSNTYEQLSKLDNTVQDAGLYQGQVLVIEPQNEDGTWPRQTLQSKSSTAPSRNFTTSPKSSASPYSSVSASLIANGDSTSTCGMHSSGVSRGGSGFSASYNCQEPPSSHIQPGLCGLGNLGNTCFMNSALQCLSNTAPLTDYFLKDEYEAEINRDNPLGMKGEIAEAYAELIKQMWSGRDAHVAPRMFKTQVGRFAPQFSGYQQQDSQELLAFLLDGLHEDLNRVKKKPYLELKDANGRPDAVVAKEAWENHRLRNDSVIVDTFHGLFKSTLVCPECAKVSVTFDPFCYLTLPLPLKKDRVMEVFLVPADPHCRPTQYRVTVPLMGAVSDLCEALSRLSGIAAENMVVADVYNHRFHKIFQMDEGLNHIMPRDDIFVYEVCSTSVDGSECVTLPVYFRERKSRPSSTSSASALYGQPLLLSVPKHKLTLESLYQAVCDRISRYVKQPLPDEFGSSPLEPGACNGSRNSCEGEDEEEMEHQEEGKEQLSETEGSGEDEPGNDPSETTQKKIKGQPCPKRLFTFSLVNSYGTADINSLAADGKLLKLNSRSTLAMDWDSETRRLYYDEQESEAYEKHVSMLQPQKKKKTTVALRDCIELFTTMETLGEHDPWYCPNCKKHQQATKKFDLWSLPKILVVHLKRFSYNRYWRDKLDTVVEFPIRGLNMSEFVCNLSARPYVYDLIAVSNHYGAMGVGHYTAYAKNKLNGKWYYFDDSNVSLASEDQIVTKAAYVLFYQRRDDEFYKTPSLSSSGSSDGGTRPSSSQQGFGDDEACSMDTN

SEQ ID NO: 26 - protein, 913 aa, Homo sapiens
MAALFLRGFVQIGNCKTGISKSKEAFIEAVERKKKDRLVLYFKSGKYSTFRLSDNIQNVVLKSYRGNQNHLHLTLQNNNGLFIEGLSSTDAEQLKIFLDRVHQNEVQPPVRPGKGGSVFSSTTQKEINKTSFHKVDEKSSSKSFEIAKGSGTGVLQRMPLLTSKLTLTCGELSENQHKKRKRMLSSSSEMNEEFLKENNSVEYKKSKADCSRCVSYNREKQLKLKELEENKKLECESSCIMNATGNPYLDDIGLLQALTEKMVLVFLLQQGYSDGYTKWDKLKLFFELFPEKICHGLPNLGNTCYMNAVLQSLLSIPSFADDLLNQSFPWGKIPLNALTMCLARLLFFKDTYNIEIKEMLLLNLKKAISAAAEIFHGNAQNDAHEFLAHCLDQLKDNMEKLNTIWKPKSEFGEDNFPKQVFADDPDTSGFSCPVITNFELELLHSIACKACGQVILKTELNNYLSINLPQRIKAHPSSIQSTFDLFFGAEELEYKCAKCEHKTSVGVHSFSRLPRILIVHLKRYSLNEFCALKKNDQEVIISKYLKVSSHCNEGTRPPLPLSEDGEITDFQLLKVIRKMTSGNISVSWPATKESKDILAPHIGSDKESEQKKGQTVFKGASRRQQQKYLGKNSKPNELESVYSGDRAFIEKEPLAHLMTYLEDTSLCQFHKAGGKPASSPGTPLSKVDFQTVPENPKRKKYVKTSKFVAFDRIINPTKDLYEDKNIRIPERFQKVSEQTQQCDGMRICEQAPQQALPQSFPKPGTQGHTKNLLRPTKLNLQKSNRNSLLALGSNKNPRNKDILDKIKSKAKETKRNDDKGDHTYRLISVVSHLGKTLKSGHYICDAYDFEKQIWFTYDDMRVLGIQEAQMQEDRRCTGYIFFYMHNEIFEEMLKREENAQLNSKEVEETLQKE

SEQ ID NO: 27 - protein, 1318 aa, Homo sapiens
MSGGASATGPRRGPPGLEDTTSKKKQKDRANQESKDGDPRKETGSRYVAQAGLEPLASGDPSASASHAAGITGSRHRTRLFFPSSSGSASTPQEEQTKEGACEDPHDLLATPTPELLLDWRQSAEEVIVKLRVGVGPLQLEDVDAAFTDTDCVVRFAGGQQWGGVFYAEIKSSCAKVQTRKGSLLHLTLPKKVPMLTWPSLLVEADEQLCIPPLNSQTCLLGSEENLAPLAGEKAVPPGNDPVSPAMVRSRNPGKDDCAKEEMAVAADAATLVDEPESMVNLAFVKNDSYEKGPDSVVVHVYVKEICRDTSRVLFREQDFTLIFQTRDGNFLRLHPGCGPHTTFRWQVKLRNLIEPEQCTFCFTASRIDICLRKRQSQRWGGLEAPAARVGGAKVAVPTGPTPLDSTPPGGAPHPLTGQEEARAVEKDKSKARSEDTGLDSVATRTPMEHVTPKPETHLASPKPTCMVPPMPHSPVSGDSVEEEEEEEKKVCLPGFTGLVNLGNTCFMNSVIQSLSNTRELRDFFHDRSFEAEINYNNPLGTGGRLAIGFAVLLRALWKGTHHAFQPSKLKAIVASKASQFTGYAQHDAQEFMAFLLDGLHEDLNRIQNKPYTETVDSDGRPDEVVAEEAWQRHKMRNDSFIVDLFQGQYKSKLVCPVCAKVSITFDPFLYLPVPLPQKQKVLPVFYFAREPHSKPIKFLVSVSKENSTASEVLDSLSQSVHVKPENLRLAEVIKNRFHRVFLPSHSLDTVSPSDTLLCFELLSSELAKERVVVLEVQQRPQVPSVPISKCAACQRKQQSEDEKLKRCTRCYRVGYCNQLCQKTHWPDHKGLCRPENIGYPFLVSVPASRLTYARLAQLLEGYARYSVSVFQPPFQPGRMALESQSPGCTTLLSTGSLEAGDSERDPIQPPELQLVTPMAEGDTGLPRVWAAPDRGPVPSTSGISSEMLASGPIEVGSLPAGERVSRPEAAVPGYQHPSEAMNAHTPQFFIYKIDSSNREQRLEDKGDTPLELGDDCSLALVWRNNERLQEFVLVASKELECAEDPGSAGEAARAGHFTLDQCLNLFTRPEVLAPEEAWYCPQCKQHREASKQLLLWRLPNVLIVQLKRFSFRSFIWRDKINDLVEFPVRNLDLSKFCIGQKEEQLPSYDLYAVINHYGGMIGGHYTACARLPNDRSSQRSDVGWRLFDDSTVTTVDESQVVTRYAYVLFYRRRNSPVERPPRAGHSEHHPDLGPAAEAAASQASRIWQELEAEEEPVPEGSGPLGPWGPQDWVGPLPRGPTTPDEGCLRYFVLGTVAALVALVLNVFYPLVSQSRWR

SEQ ID NO: 28 - protein, 798 aa, Homo sapiens
MALHSPQYIFGDFSPDEFNQFFVTPRSSVELPPYSGTVLCGTQAVDKLPDGQEYQRIEFGVDEVIEPSDTLPRTPSYSISSTLNPQAPEFILGCTASKITPDGITKEASYGSIDCQYPGSALALDGSSNVEAEVLENDGVSGGLGQRERKKKKKRPPGYYSYLKDGGDDSISTEALVNGHANSAVPNSVSAEDAEFMGDMPPSVTPRTCNSPQNSTDSVSDIVPDSPFPGALGSDTRTAGQPEGGPGADFGQSCFPAEAGRDTLSRTAGAQPCVGTDTTENLGVANGQILESSGEGTATNGVELHTTESIDLDPTKPESASPPADGTGSASGTLPVSQPKSWASLFHDSKPSSSSPVAYVETKYSPPAISPLVSEKQVEVKEGLVPVSEDPVAIKIAELLENVTLIHKPVSLQPRGLINKGNWCYINATLQALVACPPMYHLMKFIPLYSKVQRPCTSTPMIDSFVRLMNEFTNMPVPPKPRQALGDKIVRDIRPGAAFEPTYIYRLLTVNKSSLSEKGRQEDAEEYLGFILNGLHEEMLNLKKLLSPSNEKLTISNGPKNHSVNEEEQEEQGEGSEDEWEQVGPRNKTSVTRQADFVQTPITGIFGGHIRSVVYQQSSKESATLQPFFTLQLDIQSDKIRTVQDALESLVARESVQGYTTKTKQEVEISRRVTLEKLPPVLVLHLKRFVYEKTGGCQKLIKNIEYPVDLEISKELLSPGVKNKNFKCHRTYRLFAVVYHHGNSATGGHYTTDVFQIGLNGWLRIDDQTVKVINQYQVVKPTAERTAYLLYYRRVDLL

SEQ ID NO: 29 - protein, 688 aa, Homo sapiens
MDRCKHVGRLRLAQDHSILNPQKWCCLECATTESVWACLKCSHVACGRYIEDHALKHFEETGHPLAMEVRDLYVFCYLCKDYVLNDNPEGDLKLLRSSLLAVRGQKQDTPVRRGRTLRSMASGEDVVLPQRAPQGQPQMLTALWYRRQRLLARTLRLWFEKSSRGQAKLEQRRQEEALERKKEEARRRRREVKRRLLEELASTPPRKSARLLLHTPRDAGPAASRPAALPTSRRVPAATLKLRRQPAMAPGVTGLRNLGNTCYMNSILQVLSHLQKFRECFLNLDPSKTEHLFPKATNGKTQLSGKPTNSSATELSLRNDRAEACEREGFCWNGRASISRSLELIQNKEPSSKHISLCRELHTLFRVMWSGKWALVSPFAMLHSVWSLIPAFRGYDQQDAQEFLCELLHKVQQELESEGTTRRILIPFSQRKLTKQVLKVVNTIFHGQLLSQVTCISCNYKSNTIEPFWDLSLEFPERYHCIEKGFVPLNQTECLLTEMLAKFTETEALEGRIYACDQCNSKRRKSNPKPLVLSEARKQLMIYRLPQVLRLHLKRFRWSGRNHREKIGVHVVFDQVLTMEPYCCRDMLSSLDKETFAYDLSAVVMHHGKGFGSGHYTAYCYNTEGGFWVHCNDSKLNVCSVEEVCKTQAYILFYTQRTVQGNARISETHLQAQVQSSNNDEGRPQTFS

SEQ ID NO: 30 - protein, 530 aa, Homo sapiens
MEDDSLYLGGEWQFNHFSKLTSPRPDAAFAEIQRTSLPEKSPLSSETRVDLCDDLAPVARQLAPREKLPLSSRRPAAVGAGLQNMGNTCYLNASLQCLTYTPPLANYMLSREHSQTCQRPKCCMLCTMQAHITWALHSPGHVIQPSQALAAGFHRGKQEDAHEFLMFTVDAMKKACLPGHKQVDHHSKDTTLIHQIFGGCWRSQIKCLHCHGISDTFDPYLDIALDIQAAQSVKQALEQLVKPEELNGENAYPCGLCLQRAPASNTLTLHTSAKVLILVLKRFCDVTGNKLAKNVQYPECLDMQPYMSQQNTGPLVYVLYAVLVHAGWSCHNGYYFSYVKAQEGQWYKMDDAEVTACSITSVLSQQAYVLFYIQKSEWERHSESVSRGREPRALGAEDTDRPATQGELKRDHPCLQVPELDEHLVERATEESTLDHWKFPQEQNKMKPEFNVRKVEGTLPPNVLVIHQSKYKCGMKNHHPEQQSSLLNLSSMNSTDQESMNTGTLASLQGRTRRSKGKNKHSKRSLLVCQ

SEQ ID NO: 31 - protein, 350 aa, Homo sapiens
GSKKHTGYVGLKNQGATCYMNSLLQTLFFTNQLRKAVYMMPTEGDDSSKSVPLALQRVFYELQHSDKPVGTKKLTKSFGWETLDSFMQHDVQELCRVLLDNVENKMKGTCVEGTIPKLFRGKMVSYIQCKEVDYRSDRREDYYDIQLSIKGKKNIFESFVDYVAVEQLDGDNKYDAGEHGLQEAEKGVKFLTLPPVLHLQLMRFMYDPQTDQNIKINDRFEFPEQLPLDEFLQKTDPKDPANYILHAVLVHSGDNHGGHYVVYLNPKGDGKWCKFDDDVVSRCTKEEAIEHNYGGHDDDLSVRHCTNAYMLVYIRESKLSEVLQAVTDHDIPQQLVERLQEEKRIEAQKR

SEQ ID NO: 32 - protein, 343 aa, Homo sapiens
AQGLAGLRNLGNTCFMNSILQCLSNTRELRDYCLQRLYMRDLHHGSNAHTALVEEFAKLIQTIWTSSPNDVVSPSEFKTQIQRYAPRFVGYNQQDAQEFLRFLLDGLHNEVNRVTLRPKSNPENLDHLPDDEKGRQMWRKYLEREDSRIGDLFVGQLKSSLTCTDCGYCSTVFDPFWDLSLPIAKRGYPEVTLMDCMRLFTKEDVLDGDEKPTCCRCRGRKRCIKKFSIQRFPKILVLHLKRFSESRIRTSKLTTFVNFPLRDLDLREFASENTNHAVYNLYAVSNHSGTTMGGHYTAYCRSPGTGEWHTFNDSSVTPMSSSQVRTSDAYLLFYELASPPSRM

SEQ ID NO: 33 - protein, 374 aa, Homo sapiens
GLEIMIGKKKGIQGHYNSCYLDSTLFCLFAFSSVLDTVLLRPKEKNDVEYYSETQELLRTEIVNPLRIYGYVCATKIMKLRKILEKVEAASGFTSEEKDPEEFLNILFHHILRVEPLLKIRSAGQKVQDCYFYQIFMEKNEKVGVPTIQQLLEWSFINSNLKFAEAPSCLIIQMPRFGKDFKLFKKIFPSLELNITDLLEDTPRQCRICGGLAMYECRECYDDPDISAGKIKQFCKTCNTQVHLHPKRLNHKYNPVSLPKDLPDWDWRHGCIPCQNMELFAVLCIETSHYVAFVKYGKDDSAWLFFDSMADRDGGQNGFNIPQVTPCPEVGEYLKMSLEDLHSLDSRRIQGCARRLLCDAYMCMYQSPTMSLYK

SEQ ID NO: 34 - protein, 530 aa, Homo sapiens
MEDDSLYLGGEWQFNHFSKLTSSRPDAAFAEIQRTSLPEKSPLSCETRVDLCDDLAPVARQLAPREKLPLSSRRPAAVGAGLQNMGNTCYVNASLQCLTYTPPLANYMLSREHSQTCHRHKGCMLCTMQAHITRALHNPGHVIQPSQALAAGFHRGKQEDAHEFLMFTVDAMKKACLPGHKQVDHHSKDTTLIHQIFGGYWRSQIKCLHCHGISDTFDPYLDIALDIQAAQSVQQALEQLVKPEELNGENAYHCGVCLQRAPASKTLTLHTSAKVLILVLKRFSDVTGNKIAKNVQYPECLDMQPYMSQTNTGPLVYVLYAVLVHAGWSCHNGHYFSYVKAQEGQWYKMDDAEVTASSITSVLSQQAYVLFYIQKSEWERHSESVSRGREPRALGAEDTDRRAKQGELKRDHPCLQAPELDEHLVERATQESTLDHWKFLQEQNKTKPEFNVRKVEGTLPPDVLVIHQSKYKCGMKNHHPEQQSSLLNLSSTTPTHQESMNTGTLASLRGRARRSKGKNKHSKRALLVCQ

SEQ ID NO: 35 - protein, 525 aa, Homo sapiens
MVSRPEPEGEAMDAELAVAPPGCSHLGSFKVDNWKQNLRAIYQCFVWSGTAEARKRKAKSCICHVCGVHLNRLHSCLYCVFFGCFTKKHIHEHAKAKRHNLAIDLMYGGIYCFLCQDYIYDKDMEIIAKEEQRKAWKMQGVGEKFSTWEPTKRELELLKHNPKRRKITSNCTIGLRGLINLGNTCFMNCIVQALTHTPLLRDFFLSDRHRCEMQSPSSCLVCEMSSLFQEFYSGHRSPHIPYKLLHLVWTHARHLAGYEQQDAHEFLIAALDVLHRHCKGDDNGKKANNPNHCNCIIDQIFTGGLQSDVTCQVCHGVSTTIDPFWDISLDLPGSSTPFWPLSPGSEGNVVNGESHVSGTTTLTDCLRRFTRPEHLGSSAKIKCSGCHSYQESTKQLTMKKLPIVACFHLKRFEHSAKLRRKITTYVSFPLELDMTPFMASSKESRMNGQYQQPTDSLNNDNKYSLFAVVNHQGTLESGHYTSFIRQHKDQWFKCDDAIITKASIKDVLDSEGYLLFYHKQFLEYE

SEQ ID NO: 36 - protein, 372 aa, Homo sapiens
MSKAFGLLRQICQSILAESSQSPADLEEKKEEDSNMKREQPRERPRAWDYPHGLVGLHNIGQTCCLNSLIQVFVMNVDFTRILKRITVPRGADEQRRSVPFQMLLLLEKMQDSRQKAVRPLELAYCLQKCNVPLFVQHDAAQLYLKLWNLIKDQITDVHLVERLQALYTIRVKDSLICVDCAMESSRNSSMLTLPLSLFDVDSKPLKTLEDALHCFFQPRELSSKSKCFCENCGKKTRGKQVLKLTHLPQTLTIHLMRFSIRNSQTRKICHSLYFPQSLDFSQILPMKRESCDAEEQSGGQYELFAVIAHVGMADSGHYCVYIRNAVDGKWFCFNDSNICLVSWEDIQCTYGNPNYHWQETAYLLVYMKMEC

SEQ ID NO: 37 - protein, 1077 aa, Homo sapiens
MTAELQQDDAAGAADGHGSSCQMLLNQLREITGIQDPSFLHEALKASNGDITQAVSLLTDERVKEPSQDTVATEPSEVEGSAANKEVLAKVIDLTHDNKDDLQAAIALSLLESPKIQADGRDLNRMHEATSAETKRSKRKRCEVWGENPNPNDWRRVDGWPVGLKNVGNTCWFSAVIQSLFQLPEFRRLVLSYSLPQNVLENCRSHTEKRNIMFMQELQYLFALMMGSNRKFVDPSAALDLLKGAFRSSEEQQQDVSEFTHKLLDWLEDAFQLAVNVNSPRNKSENPMVQLFYGTFLTEGVREGKPFCNNETFGQYPLQVNGYRNLDECLEGAMVEGDVELLPSDHSVKYGQERWFTKLPPVLTFELSRFEFNQSLGQPEKIHNKLEFPQIIYMDRYMYRSKELIRNKRECIRKLKEEIKILQQKLERYVKYGSGPARFPLPDMLKYVIEFASTKPASESCPPESDTHMTLPLSSVHCSVSDQTSKESTSTESSSQDVESTFSSPEDSLPKSKPLTSSRSSMEMPSQPAPRTVTDEEINFVKTCLQRWRSEIEQDIQDLKTCIASTTQTIEQMYCDPLLRQVPYRLHAVLVHEGQANAGHYWAYIYNQPRQSWLKYNDISVTESSWEEVERDSYGGLRNVSAYCLMYINDKLPYFNAEAAPTESDQMSEVEALSVELKHYIQEDNWRFEQEVEEWEEEQSCKIPQMESSTNSSSQDYSTSQEPSVASSHGVRCLSSEHAVIVKEQTAQAIANTARAYEKSGVEAALSEVMLSPAMQGVILAIAKARQTFDRDGSEAGLIKAFHEEYSRLYQLAKETPTSHSDPRLQHVLVYFFQNEAPKRVVERTLLEQFADKNLSYDERSISIMKVAQAKLKEIGPDDMNMEEYKKWHEDYSLFRKVSVYLLTGLELYQKGKYQEALSYLVYAYQSNAALLMKGPRRGVKESVIALYRRKCLLELNAKAASLFETNDDHSVTEGINVMNELIIPCIHLIINNDISKDDLDAIEVMRNHWCSYLGQDIAENLQLCLGEFLPRLLDPSAEIIVLKEPPTIRPNSPYDLCSRFAAVMESIQGVSTVTVK

SEQ ID NO: 38 - protein, 530 aa, Homo sapiens
MEDDSLYLGGEWQFNHFSKLTSSRPDAAFAEIQRTSLPEKSPLSSEARVDLCDDLAPVARQLAPRKKLPLSSRRPAAVGAGLQNMGNTCYENASLQCLTYTPPLANYMLSREHSQTCQRPKCCMLCTMQAHITWALHSPGHVIQPSQALAAGFHRGKQEDAHEFLMFTVDAMKKACLPGHKQVDHHSKDTTLIHQIFGGCWRSQIKCLHCHGISDTFDPYLDIALDIQAAQSVKQALEQLVKPEELNGENAYHCGLCLQRAPASKTLTLHTSAKVLILVLKRFSDVTGNKLAKNVQYPECLDMQPYMSQQNTGPLVYVLYAVLVHAGWSCHDGHYFSYVKAQEGQWYKMDDAKVTACSITSVLSQQAYVLFYIQKSEWERHSESVSRGREPRALGAEDTDRRATQGELKRDHPCLQAPELDERLVERATQESTLDHWKFPQEQNKTKPEFNVRKVEGTLPPNVLVIHQSKYKCGMKNHHPEQQSSLLNLSSTTRTDQESVNTGTLASLQGRTRRSKGKNKHSKRALLVCQ

SEQ ID NO: 39 - protein, 1352 aa, Homo sapiens
MSKVTAPGSGPPAAASGKEKRSFSKRLFRSGRAGGGGAGGPGASGPAAPSSPSSPSSARSVGSFMSRVLKTLSTLSHLSSEGAAPDRGGLRSCFPPGPAAAPTPPPCPPPPASPAPPACAAEPVPGVAGLRNHGNTCFMNATLQCLSNTELFAEYLALGQYRAGRPEPSPDPEQPAGRGAQGQGEVTEQLAHLVRALWTLEYTPQHSRDFKTIVSKNALQYRGNSQHDAQEFLLWLLDRVHEDLNHSVKQSGQPPLKPPSETDMMPEGPSFPVCSTFVQELFQAQYRSSLTCPHCQKQSNTFDPFLCISLPIPLPHTRPLYVTVVYQGKCSHCMRIGVAVPLSGTVARLREAVSMETKIPTDQIVLTEMYYDGFHRSFCDTDDLETVHESDCIFAFETPEIFRPEGILSQRGIHLNNNLNHLKFGLDYHRLSSPTQTAAKQGKMDSPTSRAGSDKIVLLVCNRACTGQQGKRFGLPFVLHLEKTIAWDLLQKEILEKMKYFLRPTVCIQVCPFSLRVVSVVGITYLLPQEEQPLCHPIVERALKSCGPGGTAHVKLVVEWDKETRDFLFVNTEDEYIPDAESVRLQRERHHQPQTCTLSQCFQLYTKEERLAPDDAWRCPHCKQLQQGSITLSLWTLPDVLIIHLKRFRQEGDRRMKLQNMVKFPLTGLDMTPHVVKRSQSSWSLPSHWSPWRRPYGLGRDPEDYIYDLYAVCNHHGTMQGGHYTAYCKNSVDGLWYCFDDSDVQQLSEDEVCTQTAYILFYQRRTAIPSWSANSSVAGSTSSSLCEHWVSRLPGSKPASVTSAASSRRTSLASLSESVEMTGERSEDDGGFSTRPFVRSVQRQSLSSRSSVTSPLAVNENCMRPSWSLSAKLQMRSNSPSRFSGDSPIHSSASTLEKIGEAADDKVSISCFGSLRNLSSSYQEPSDSHSRREHKAVGRAPLAVMEGVFKDESDTRRLNSSVVDTQSKHSAQGDRLPPLSGPFDNNNQIAYVDQSDSVDSSPVKEVKAPSHPGSLAKKPESTTKRSPSSKGTSEPEKSLRKGRPALASQESSLSSTSPSSPLPVKVSLKPSRSRSKADSSSRGSGRHSSPAPAQPKKESSPKSQDSVSSPSPQKQKSASALTYTASSTSAKKASGPATRSPFPPGKSRTSDHSLSREGSRQSLGSDRASATSTSKPNSPRVSQARAGEGRGAGKHVRSSSMASLRSPSTSIKSGLKRDSKSEDKGLSFFKSALRQKETRRSTDLGKTALLSKKAGGSSVKSVCKNTGDDEAERGHQPPASQQPNANTTGKEQLVTKDPASAKHSLLSARKSKSSQLDSGVPSSPGGRQSAEKSSKKLSSSMQTSARPSQKPQ

SEQ ID NO: 40 - protein, 530 aa, Homo sapiens
MEEDSLYLGGEWQFNHFSKLTSSRPDAAFAEIQRTSLPEKSPLSCETRVDLCDDLAPVARQLAPREKLPLSSRRPAAVGAGLQNMGNTCYVNASLQCLTYTPPLANYMLSREHSQTCHRHKGCMLCTMQAHITRALHNPGHVIQPSQALAAGFHRGKQEDAHEFLMFTVDAMKKACLPGHKQVDHHSKDTTLIHQIFGGYWRSQIKCLHCHGISDTFDPYLDIALDIQAAQSVQQALEQLVKPEELNGENAYHCGVCLQRAPASKTLTLHTSAKVLILVLKRFSDVTGNKIAKNVQYPECLDMQPYMSQTNTGPLVYVLYAVLVHAGWSCHNGHYFSYVKAQEGQWYKMDDAEVTASSITSVLSQQAYVLFYIQKSEWERHSESVSRGREPRALGAEDTDRRATQGELKRDHPCLQAPELDEHLVERATQESTLDHWKFLQEQNKTKPEFNVRKVEGTLPPDVLVIHQSKYKCGMKNHHPEQQSSLLKLSSTTPTHQESMNTGTLASLRGRARRSKGKNKHSKRALLVCQ

SEQ ID NO: 41 - protein, 553 aa, Homo sapiens
MEDDSLYLGGEWQFNHFSKLTSSRPDAAFAEIQRTSLPEKSPLSCETRVDLCDDLAPVARQLAPREKLPLSSRRPAAVGAGLQNMGNTCYVNASLQCLTYTPPLANYMLSREHSQTCHRHKGCMLCTMQAHITRALHNPGHVIQPSQALAAGFHRGKQEDAHEFLMFTVDAMKKACLPGHKQVDHHSKDTTLIHQIFGGYWRSQIKCLHCHGISDTFDPYLDIALDIQAAQSVQQALEQLVKPEELNGENAYHCGVCLQRAPASKTLTLHTSAKVLILVLKRFSDVTGNKIDKNVQYPECLDMKLYMSQTNSGPLVYVLYAVLVHAGWSCHNGHYFSYVKAQEGQWYKMDDAEVTASSITSVLSQQAYVLFYIQKSEWERHSESVSRGREPRALGAEDTDRRATQGELKRDHPCLQAPELDEHLVERATQESTLDHWKFLQEQNKTKPEFNVRKVEGTLPPDVLVIHQSKYKCGMKNHHPEQQSSLLNLSSTTPTHQESMNTGTLASLRGRARRSKGKNKHSKRALLVCQWSQWKYRPTRRGAHTHAHTQTHT

SEQ ID NO: 42 - protein, 1375 aa, Homo sapiens
MVPGEENQLVPKEDVFWRCRQNIFDEMKKKFLQIENAAEEPRVLCIIQDTTNSKTVNERITLNLPASTPVRKLFEDVANKVGYINGTFDLVWGNGINTADMAPLDHTSDKSLLDANFEPGKKNFLHLTDKDGEQPQILLEDSSAGEDSVHDRFIGPLPREGSGGSTSDYVSQSYSYSSILNKSETGYVGLVNQAMTCYLNSLLQTLFMTPEFRNALYKWEFEESEEDPVTSIPYQLQRLFVLLQTSKKRAIETTDVTRSFGWDSSEAWQQHDVQELCRVMFDALEQKWKQTEQADLINELYQGKLKDYVRCLECGYEGWRIDTYLDIPLVIRPYGSSQAFASVEEALHAFIQPEILDGPNQYFCERCKKKCDARKGLRFLHFPYLLTLQLKRFDFDYTTMHRIKLNDRMTFPEELDMSTFIDVEDEKSPQTESCTDSGAENEGSCHSDQMSNDFSNDDGVDEGICLETNSGTEKISKSGLEKNSLIYELFSVMVHSGSAAGGHYYACIKSFSDEQWYSFNDQHVSRITQEDIKKTHGGSSGSRGYYSSAFASSTNAYMLIYRLKDPARNAKFLEVDEYPEHIKNLVQKERELEEQEKRQREIERNTCKIKLFCLHPTKQVMMENKLEVHKDKTLKEAVEMAYKMMDLEEVIPLDCCRLVKYDEFHDYLERSYEGEEDTPMGLLLGGVKSTYMFDLLLETRKPDQVFQSYKPGEVMVKVHVVDLKAESVAAPITVRAYLNQTVTEFKQLISKAIHLPAETMRIVLERCYNDLRLLSVSSKTLKAEGFFRSNKVFVESSETLDYQMAFADSHLWKLLDRHANTIRLFVLLPEQSPVSYSKRTAYQKAGGDSGNVDDDCERVKGPVGSLKSVEAILEESTEKLKSLSLQQQQDGDNGDSSKSTETSDFENIESPLNERDSSASVDNRELEQHIQTSDPENFQSEERSDSDVNNDRSTSSVDSDILSSSHSSDTLCNADNAQIPLANGLDSHSITSSRRTKANEGKKETWDTAEEDSGTDSEYDESGKSRGEMQYMYFKAEPYAADEGSGEGHKWLMVHVDKRITLAAFKQHLEPFVGVLSSHFKVFRVYASNQEFESVRLNETLSSFSDDNKITIRLGRALKKGEYRVKVYQLLVNEQEPCKFLLDAVFAKGMTVRQSKEELIPQLREQCGLELSIDRFRLRKKTWKNPGTVFLDYHIYEEDINISSNWEVFLEVLDGVEKMKSMSQLAVLSRRWKPSEMKLDPFQEVVLESSSVDELREKLSEISGIPLDDIEFAKGRGTFPCDISVLDIHQDLDWNPKVSTLNVWPLYICDDGAVIFYRDKTEELMELTDEQRNELMKKESSRLQKTGHRVTYSPRKEKALKIYLDGAPNKDLTQD

SEQ ID NO: 43 - protein, 711 aa, Homo sapiens
MAQVRETSLPSGSGVRWISGGGGGASPEEAVEKAGKMEEAAAGATKASSRREAEEMKLEPLQEREPAPEENLTWSSSGGDEKVLPSIPLRCHSSSSPVCPRRKPRPRPQPRARSRSQPGLSAPPPPPARPPPPPPPPPPPAPRPRAWRGSRRRSRPGSRPQTRRSCSGDLDGSGDPGGLGDWLLEVEFGQGPTGCSHVESFKVGKNWQKNLRLIYQRFVWSGTPETRKRKAKSCICHVCSTHMNRLHSCLSCVFFGCFTEKHIHKHAETKQHHLAVDLYHGVIYCFMCKDYVYDKDIEQIAKETKEKILRLLTSTSTDVSHQQFMTSGFEDKQSTCETKEQEPKLVKPKKKRRKKSVYTVGLRGLINLGNTCFMNCIVQALTHIPLLKDFFLSDKHKCIMTSPSLCLVCEMSSLFHAMYSGSRTPHIPYKLLHLIWIHAEHLAGYRQQDAHEFLIAILDVLHRHSKDDSGGQEANNPNCCNCIIDQIFTGGLQSDVTCQACHSVSTTIDPCWDISLDLPGSCATFDSQNPERADSTVSRDDHIPGIPSLTDCLQWFTRPEHLGSSAKIKCNSCQSYQESTKQLTMKKLPIVACFHLKRFEHVGKQRRKINTFISFPLELDMTPFLASTKESRMKEGQPPTDCVPNENKYSLFAVINHHGTLESGHYTSFIRQQKDQWFSCDDAIITKATIEDLLYSEGYLLFYHKQGLEKD

SEQ ID NO: 44 - protein, 1123 aa, Homo sapiens
MPIVDKLKEALKPGRKDSADDGELGKLLASSAKKVLLQKIEFEPASKSFSYQLEALKSKYVLLNPKTEGASRHKSGDDPPARRQGSEHTYESCGDGVPAPQKVLFPTERLSLRWERVFRVGAGLHNLGNTCFLNATIQCLTYTPPLANYLLSKEHARSCHQGSFCMLCVMQNHIVQAFANSGNAIKPVSFIRDLKKIARHFRFGNQEDAHEFLRYTIDAMQKACLNGCAKLDRQTQATTLVHQIFGGYLRSRVKCSVCKSVSDTYDPYLDVALEIRQAANIVRALELFVKADVLSGENAYMCAKCKKKVPASKRFTIHRTSNVLTLSLKRFANFSGGKITKDVGYPEFLNIRPYMSQNNGDPVMYGLYAVLVHSGYSCHAGHYYCYVKASNGQWYQMNDSLVHSSNVKVVLNQQAYVLFYLRIPGSKKSPEGLISRTGSSSLPGRPSVIPDHSKKNIGNGIISSPLTGKRQDSGTMKKPHTTEEIGVPISRNGSTLGLKSQNGCIPPKLPSGSPSPKLSQTPTHMPTILDDPGKKVKKPAPPQHFSPRTAQGLPGTSNSNSSRSGSQRQGSWDSRDVVLSTSPKLLATATANGHGLKGNDESAGLDRRGSSSSSPEHSASSDSTKAPQTPRSGAAHLCDSQETNCSTAGHSKTPPSGADSKTVKLKSPVLSNTTTEPASTMSPPPAKKLALSAKKASTLWRATGNDLRPPPPSPSSDLTHPMKTSHPVVASTWPVHRARAVSPAPQSSSRLQPPFSPHPTLLSSTPKPPGTSEPRSCSSISTALPQVNEDLVSLPHQLPEASEPPQSPSEKRKKTFVGEPQRLGSETRLPQHIREATAAPHGKRKRKKKKRPEDTAASALQEGQTQRQPGSPMYRREGQAQLPAVRRQEDGTQPQVNGQQVGCVTDGHHASSRKRRRKGAEGLGEEGGLHQDPLRHSCSPMGDGDPEAMEESPRKKKKKKRKQETQRAVEEDGHLKCPRSAKPQDAVVPESSSCAPSANGWCPGDRMGLSQAPPVSWNGERESDVVQELLKYSSDKAYGRKVLTWDGKMSAVSQDAIEDSRQARTETVVDDWDEEFDRGKEKKIKKFKREKRRNFNAFQKLQTRRNFWSVTHPAKAASLSYRR

SEQ ID NO: 45 - protein, 712 aa, Homo sapiens
MLAMDTCKHVGQLQLAQDHSSLNPQKWHCVDCNTTESIWACLSCSHVACGRYIEEHALKHFQESSHPVALEVNEMYVFCYLCDDYVLNDNTTGDLKLLRRTLSAIKSQNYHCTTRSGRFLRSMGTGDDSYFLHDGAQSLLQSEDQLYTALWHRRRILMGKIFRTWFEQSPIGRKKQEEPFQEKIVVKREVKKRRQELEYQVKAELESMPPRKSLRLQGLAQSTIIEIVSVQVPAQTPASPAKDKVLSTSENEISQKVSDSSVKRRPIVTPGVTGLRNLGNTCYMNSVLQVLSHLLIFRQCFLKLDLNQWLAMTASEKTRSCKHPPVTDTVVYQMNECQEKDTGFVCSRQSSLSSGLSGGASKGRKMELIQPKEPTSQYISLCHELHTLFQVMWSGKWALVSPFAMLHSVWRLIPAFRGYAQQDAQEFLCELLDKIQRELETTGTSLPALIPTSQRKLIKQVLNVVNNIFHGQLLSQVTCLACDNKSNTIEPFWDLSLEFPERYQCSGKDIASQPCLVTEMLAKFTETEALEGKIYVCDQCNSKRRRFSSKPVVLTEAQKQLMICHLPQVLRLHLKRFRWSGRNNREKIGVHVGFEEILNMEPYCCRETLKSLRPECFIYDLSAVVMHHGKGFGSGHYTAYCYNSEGGFWVHCNDSKLSMCTMDEVCKAQAYILFYTQRVTENGHSKLLPPELLLGSQHPNEDADTSSNEILS

SEQ ID NO: 46 - protein, 1118 aa, Homo sapiens
MPAVASVPKELYLSSSLKDLNKKTEVKPEKISTKSYVHSALKIFKTAEECRLDRDEERAYVLYMKYVTVYNLIKKRPDFKQQQDYFHSILGPGNIKKAVEEAERLSESLKLRYEEAEVRKKLEEKDRQEEAQRLQQKRQETGREDGGTLAKGSLENVLDSKDKTQKSNGEKNEKCETKEKGAITAKELYTMMTDKNISLIIMDARRMQDYQDSCILHSLSVPEEAISPGVTASWIEAHLPDDSKDTWKKRGNVEYVVLLDWFSSAKDLQIGTTLRSLKDALFKWESKTVLRNEPLVLEGGYENWLLCYPQYTTNAKVTPPPRRQNEEVSISLDFTYPSLEESIPSKPAAQTPPASIEVDENIELISGQNERMGPLNISTPVEPVAASKSDVSPIIQPVPSIKNVPQIDRTKKPAVKLPEEHRIKSESTNHEQQSPQSGKVIPDRSTKPVVFSPTLMLTDEEKARIHAETALLMEKNKQEKELRERQQEEQKEKLRKEEQEQKAKKKQEAEENEITEKQQKAKEEMEKKESEQAKKEDKETSAKRGKEITGVKRQSKSEHETSDAKKSVEDRGKRCPTPEIQKKSTGDVPHTSVTGDSGSGKPFKIKGQPESGILRTGTFREDTDDTERNKAQREPLTRARSEEMGRIVPGLPSGWAKFLDPITGTFRYYHSPTNTVHMYPPEMAPSSAPPSTPPTHKAKPQIPAERDREPSKLKRSYSSPDITQAIQEEEKRKPTVTPTVNRENKPTCYPKAEISRLSASQIRNLNPVFGGSGPALTGLRNLGNTCYMNSILQCLCNAPHLADYFNRNCYQDDINRSNLLGHKGEVAEEFGIIMKALWTGQYRYISPKDFKITIGKINDQFAGYSQQDSQELLLFLMDGLHEDLNKADNRKRYKEENNDHLDDFKAAEHAWQKHKQLNESIIVALFQGQFKSTVQCLTCHKKSRTFEAFMYLSLPLASTSKCTLQDCLRLFSKEEKLTDNNRFYCSHCRARRDSLKKIEIWKLPPVLLVHLKRFSYDGRWKQKLQTSVDFPLENLDLSQYVIGPKNNLKKYNLFSVSNHYGGLDGGHYTAYCKNAARQRWFKFDDHEVSDISVSSVKSSAAYILFYTSLGPRVTDVAT

SEQ ID NO: 47 - protein, 979 aa, Homo sapiens
MSPLKIHGPIRIRSMQTGITKWKEGSFEIVEKENKVSLVVHYNTGGIPRIFQLSHNIKNVVLRPSGAKQSRLMLTLQDNSFLSIDKVPSKDAEEMRLFLDAVHQNRLPAAMKPSQGSGSFGAILGSRTSQKETSRQLSYSDNQASAKRGSLETKDDIPFRKVLGNPGRGSIKTVAGSGIARTIPSLTSTSTPLRSGLLENRTEKRKRMISTGSELNEDYPKENDSSSNNKAMTDPSRKYLTSSREKQLSLKQSEENRTSGLLPLQSSSFYGSRAGSKEHSSGGTNLDRTNVSSQTPSAKRSLGFLPQPVPLSVKKLRCNQDYTGWNKPRVPLSSHQQQQLQGFSNLGNTCYMNAILQSLFSLQSFANDLLKQGIPWKKIPLNALIRRFAHLLVKKDICNSETKKDLLKKVKNAISATAERFSGYMQNDAHEFLSQCLDQLKEDMEKLNKTWKTEPVSGEENSPDISATRAYTCPVITNLEFEVQHSIICKACGEIIPKREQFNDLSIDLPRRKKPLPPRSIQDSLDLFFRAEELEYSCEKCGGKCALVRHKFNRLPRVLILHLKRYSFNVALSLNNKIGQQVIIPRYLTLSSHCTENTKPPFTLGWSAHMAISRPLKASQMVNSCITSPSTPSKKFTFKSKSSLALCLDSDSEDELKRSVALSQRLCEMLGNEQQQEDLEKDSKLCPIEPDKSELENSGFDRMSEEELLAAVLEISKRDASPSLSHEDDDKPTSSPDTGFAEDDIQEMPENPDTMETEKPKTITELDPASFTEITKDCDENKENKTPEGSQGEVDWLQQYDMEREREEQELQQALAQSLQEQEAWEQKEDDDLKRATELSLQEFNNSFVDALGSDEDSGNEDVFDMEYTEAEAEELKRNAETGNLPHSYRLISVVSHIGSTSSSGHYISDVYDIKKQAWFTYNDLEVSKIQEAAVQSDRDRSGYIFFYMHKEIFDELLETEKNSQSLSTEVGKTTRQAL

SEQ ID NO: 48 - protein, 530 aa, Homo sapiens
MEEDSLYLGGEWQFNHFSKLTSSRLDAAFAEIQRTSLPEKSPLSCETRVDLCDDLVPEARQLAPREKLPLSSRRPAAVGAGLQNMGNTCYVNASLQCLTYTPPLANYMLSREHSQTCHRHKGCMLCTMQAHITRALHNPGHVIQPSQALAAGFHRGKQEDAHEFLMFTVDAMKKACLPGHKQVDHPSKDTTLIHQIFGGYWRSQIKCLHCHGISDTFDPYLDIALDIQAAQSVQQALEQLVKPEELNGENAYHCGVCLQRAPASKTLTLHTSAKVLILVLKRFSDVTGNKIAKNVQYPECLDMQPYMSQQNTGPLVYVLYAVLVHAGWSCHNGHYFSYVKAQEGQWYKMDDAEVTAASITSVLSQQAYVLFYIQKSEWERHSESVSRGREPRALGAEDTDRRATQGELKRDHPCLQAPELDEHLVERATQESTLDRWKFLQEQNKTKPEFNVRKVEGTLPPDVLVIHQSKYKCGMKNHHPEQQSSLLNLSSSTPTHQESMNTGTLASLRGRARRSKGKNKHSKRALLVCQ

SEQ ID NO: 49 - protein, 530 aa, Homo sapiens
MGDDSLYLGGEWQFNHFSKLTSSRPDAAFAEIQRTSLPEKSPLSSETRVDLCDDLAPVARQLAPREKLPLSSRRPAAVGAGLQNMGNTCYENASLQCLTYTLPLANYMLSREHSQTCQRPKCCMLCTMQAHITWALHSPGHVIQPSQALASGFHRGKQEDVHEFLMFTVDAMKKACLPGHKQVDHHSKDTTLIHQIFGGCWRSQIKCLHCHGISDTFDPYLDIALDIQAAQSVKQALEQLVKPEELNGENAYHCGLCLQRAPASNTLTLHTSAKVLILVLKRFSDVAGNKLAKNVQYPECLDMQPYMSQQNTGPLVYVLYAVLVHAGWSCHDGHYFSYVKAQEGQWYKMDDAEVTVCSITSVLSQQAYVLFYIQKSEWERHSESVSRGREPRALGAEDTDRRAKQGELKRDHPCLQAPELDEHLVERATQESTLDHWKFLQEQNKTKPEFNVGKVEGTLPPNALVIHQSKYKCGMKNHHPEQQSSLLNLSSTTRTDQESMNTGTLASLQGRTRRAKGKNKHSKRALLVCQ

SEQ ID NO: 50 - protein, 1684 aa, Homo sapiens
MSWKRNYFSGGRGSVQGMFAPRSSTSIAPSKGLSNEPGQNSCFLNSALQVLWHLDIFRRSFRQLTTHKCMGDSCIFCALKGIFNQFQCSSEKVLPSDTLRSALAKTFQDEQRFQLGIMDDAAECFENLLMRIHFHIADETKEDICTAQHCISHQKFAMTLFEQCVCTSCGATSDPLPFIQMVHYISTTSLCNQAICMLERREKPSPSMFGELLQNASTMGDLRNCPSNCGERIRIRRVLMNAPQIITIGLVWDSDHSDLAEDVIHSLGTCLKLGDLFFRVTDDRAKQSELYLVGMICYYGKHYSTFFFQTKIRKWMYFDDAHVKEIGPKWKDVVTKCIKGHYQPLLLLYADPQGTPVSTQDLPPQAEFQSYSRTCYDSEDSGREPSISSDTRTDSSTESYPYKHSHHESVVSHFSSDSQGTVIYNVENDSMSQSSRDTGHLTDSECNQKHTSKKGSLIERKRSSGRVRRKGDEPQASGYHSEGETLKEKQAPRNASKPSSSTNRLRDFKETVSNMIHNRPSLASQTNVGSHCRGRGGDQPDKKPPRTLPLHSRDWEIESTSSESKSSSSSKYRPTWRPKRESLNIDSIFSKDKRKHCGYTQLSPFSEDSAKEFIPDEPSKPPSYDIKFGGPSPQYKRWGPARPGSHLLEQHPRLIQRMESGYESSERNSSSPVSLDAALPESSNVYRDPSAKRSAGLVPSWRHIPKSHSSSILEVDSTASMGGWTKSQPFSGEEISSKSELDELQEEVARRAQEQELRRKREKELEAAKGFNPHPSRFMDLDELQNQGRSDGFERSLQEAESVFEESLHLEQKGDCAAALALCNEAISKLRLALHGASCSTHSRALVDKKLQISIRKARSLQDRMQQQQSPQQPSQPSACLPTQAGTLSQPTSEQPIPLQVLLSQEAQLESGMDTEFGASSFFHSPASCHESHSSLSPESSAPQHSSPSRSALKLLTSVEVDNIEPSAFHRQGLPKAPGWTEKNSHHSWEPLDAPEGKLQGSRCDNSSCSKLPPQEGRGIAQEQLFQEKKDPANPSPVMPGIATSERGDEHSLGCSPSNSSAQPSLPLYRTCHPIMPVASSFVLHCPDPVQKTNQCLQGQSLKTSLTLKVDRGSEETYRPEFPSTKGLVRSLAEQFQRMQGVSMRDSTGFKDRSLSGSLRKNSSPSDSKPPFSQGQEKGHWPWAKQQSSLEGGDRPLSWEESTEHSSLALNSGLPNGETSSGGQPRLAEPDIYQEKLSQVRDVRSKDLGSSTDLGTSLPLDSWVNITRFCDSQLKHGAPRPGMKSSPHDSHTCVTYPERNHILLHPHWNQDTEQETSELESLYQASLQASQAGCSGWGQQDTAWHPLSQTGSADGMGRRLHSAHDPGLSKTSTAEMEHGLHEARTVRTSQATPCRGLSRECGEDEQYSAENLRRISRSLSGTVVSEREEAPVSSHSFDSSNVRKPLETGHRCSSSSSLPVIHDPSVFLLGPQLYLPQPQFLSPDVLMPTMAGEPNRLPGTSRSVQQFLAMCDRGETSQGAKYTGRTLNYQSLPHRSRTDNSWAPWSETNQHIGTRFLTTPGCNPQLTYTATLPERSKGLQVPHTQSWSDLFHSPSHPPIVHPVYPPSSSLHVPLRSAWNSDPVPGSRTPGPRRVDMPPDDDWRQSSYASHSGHRRTVGEGFLFVLSDAPRREQIRARVLQHSQW

SEQ ID NO: 51 - protein, 565 aa, Homo sapiens
MSGRSKRESRGSTRGKRESESRGSSGRVKRERDREREPEAASSRGSPVRVKREFEPASAREAPASVVPFVRVKREREVDEDSEPEREVRAKNGRVDSEDRRSRHCPYLDTINRSVLDFDFEKLCSISLSHINAYACLVCGKYFQGRGLKSHAYIHSVQFSHHVFLNLHTLKFYCLPDNYEIIDSSLEDITYVLKPTFTKQQIANLDKQAKLSRAYDGTTYLPGIVGLNNIKANDYANAVLQALSNVPPLRNYFLEEDNYKNIKRPPGDIMFLLVQRFGELMRKLWNPRNFKAHVSPHEMLQAVVLCSKKTFQITKQGDGVDFLSWFLNALHSALGGTKKKKKTIVTDVFQGSMRIFTKKLPHPDLPAEEKEQLLHNDEYQETMVESTFMYLTLDLPTAPLYKDEKEQLIIPQVPLFNILAKFNGITEKEYKTYKENFLKRFQLTKLPPYLIFCIKRFTKNNFFVEKNPTIVNFPITNVDLREYLSEEVQAVHKNTTYDLIANIVHDGKPSEGSYRIHVLHHGTGKWYELQDLQVTDILPQMITLSEAYIQIWKRRDNDETNQQGA

SEQ ID NO: 52 - protein, 1018 aa, Homo sapiens
MDKILEAVVTSSYPVSVKQGLVRRVLEAARQPLEREQCLALLALGARLYVGGAEELPRRVGCQLLHVAGRHHPDVFAEFFSARRVLRLLQGGAGPPGPRALACVQLGLQLLPEGPAADEVFALLRREVLRTVCERPGPAACAQVARLLARHPRCVPDGPHRLLFCQQLVRCLGRFRCPAEGEEGAVEFLEQAQQVSGLLAQLWRAQPAAILPCLKELFAVISCAEEEPPSSALASVVQHLPLELMDGVVRNLSNDDSVTDSQMLTAISRMIDWVSWPLGKNIDKWIIALLKGLAAVKKFSILIEVSLTKIEKVFSKLLYPIVRGAALSVLKYMLLTFQHSHEAFHLLLPHIPPMVASLVKEDSNSGTSCLEQLAELVHCMVFRFPGFPDLYEPVMEAIKDLHVPNEDRIKQLLGQDAWTSQKSELAGFYPRLMAKSDTGKIGLINLGNTCYVNSILQALFMASDFRHCVLRLTENNSQPLMTKLQWLFGFLEHSQRPAISPENFLSASWTPWFSPGTQQDCSEYLKYLLDRLHEEEKTGTRICQKLKQSSSPSPPEEPPAPSSTSVEKMFGGKIVTRICCLCCLNVSSREEAFTDLSLAFPPPERCRRRRLGSVMRPTEDITARELPPPTSAQGPGRVGPRRQRKHCITEDTPPTSLYIEGLDSKEAGGQSSQEERIEREEEGKEERTEKEEVGEEEESTRGEGEREKEEEVEEEEEKVEKETEKEAEQEKEEDSLGAGTHPDAAIPSGERTCGSEGSRSVLDLVNYFLSPEKLTAENRYYCESCASLQDAEKVVELSQGPCYLILTLLRFSFDLRTMRRRKILDDVSIPLLLRLPLAGGRGQAYDLCSVVVHSGVSSESGHYYCYAREGAARPAASLGTADRPEPENQWYLFNDTRVSFSSFESVSNVTSFFPKDTAYVLFYRQRPREGPEAELGSSRVRTEPTLHKDLMEAISKDNILYLQEQEKEARSRAAYISALPTSPHWGRGFDEDKDEDEGSPGGCNPAGGNGGDFHRLVF

SEQ ID NO: 53 - protein, 981 aa, Homo sapiens
MAEGGAADLDTQRSDIATLLKTSLRKGDTWYLVDSRWFKQWKKYVGFDSWDKYQMGDQNVYPGPIDNSGLLKDGDAQSLKEHLIDELDYILLPTEGWNKLVSWYTLMEGQEPIARKVVEQGMFVKHCKVEVYLTELKLCENGNMNNVVTRRFSKADTIDTIEKEIRKIFSIPDEKETRLWNKYMSNTFEPLNKPDSTIQDAGLYQGQVLVIEQKNEDGTWPRGPSTPKSPGASNFSTLPKISPSSLSNNYNNMNNRNVKNSNYCLPSYTAYKNYDYSEPGRNNEQPGLCGLSNLGNTCFMNSAIQCLSNTPPLTEYFLNDKYQEELNFDNPLGMRGEIAKSYAELIKQMWSGKFSYVTPRAFKTQVGRFAPQFSGYQQQDCQELLAFLLDGLHEDLNRIRKKPYIQLKDADGRPDKVVAEEAWENHLKRNDSIIVDIFHGLFKSTLVCPECAKISVTFDPFCYLTLPLPMKKERTLEVYLVRMDPLTKPMQYKVVVPKIGNILDLCTALSALSGIPADKMIVTDIYNHRFHRIFAMDENLSSIMERDDIYVFEININRTEDTEHVIIPVCLREKFRHSSYTHHTGSSLFGQPFLMAVPRNNTEDKLYNLLLLRMCRYVKISTETEETEGSLHCCKDQNINGNGPNGIHEEGSPSEMETDEPDDESSQDQELPSENENSQSEDSVGGDNDSENGLCTEDTCKGQLTGHKKRLFTFQFNNLGNTDINYIKDDTRHIRFDDRQLRLDERSFLALDWDPDLKKRYFDENAAEDFEKHESVEYKPPKKPFVKLKDCIELFTTKEKLGAEDPWYCPNCKEHQQATKKLDLWSLPPVLVVHLKRFSYSRYMRDKLDTLVDFPINDLDMSEFLINPNAGPCRYNLIAVSNHYGGMGGGHYTAFAKNKDDGKWYYFDDSSVSTASEDQIVSKAAYVLFYQRQDTFSGTGFFPLDRETKGASAATGIPLESDEDSNDNDNDIENENCMHTN

SEQ ID NO: 54 - protein, 922 aa, Homo sapiens
MISLKVCGFIQIWSQKTGMTKLKEALIETVQRQKEIKLVVTFKSGKFIRIFQLSNNIRSVVLRHCKKRQSHLRLTLKNNVFLFIDKLSYRDAKQLNMFLDIIHQNKSQQPMKSDDDWSVFESRNMLKEIDKTSFYSICNKPSYQKMPLFMSKSPTHVKKGILENQGGKGQNTLSSDVQTNEDILKEDNPVPNKKYKTDSLKYIQSNRKNPSSLEDLEKDRDLKLGPSFNTNCNGNPNLDETVLATQTLNAKNGLTSPLEPEHSQGDPRCNKAQVPLDSHSQQLQQGFPNLGNTCYMNAVLQSLFAIPSFADDLLTQGVPWEYIPFEALIMTLTQLLALKDFCSTKIKRELLGNVKKVISAVAEIFSGNMQNDAHEFLGQCLDQLKEDMEKLNATLNTGKECGDENSSPQMHVGSAATKVFVCPVVANFEFELQLSLICKACGHAVLKVEPNNYLSINLHQETKPLPLSIQNSLDLFFKEEELEYNCQMCKQKSCVARHTFSRLSRVLIIHLKRYSFNNAWLLVKNNEQVYIPKSLSLSSYCNESTKPPLPLSSSAPVGKCEVLEVSQEMISEINSPLTPSMKLTSESSDSLVLPVEPDKNADLQRFQRDCGDASQEQHQRDLENGSALESELVHFRDRAIGEKELPVADSLMDQGDISLPVMYEDGGKLISSPDTRLVEVHLQEVPQHPELQKYEKTNTFVEFNFDSVTESTNGFYDCKENRIPEGSQGMAEQLQQCIEESIIDEFLQQAPPPGVRKLDAQEHTEETLNQSTELRLQKADLNHLGALGSDNPGNKNILDAENTRGEAKELTRNVKMGDPLQAYRLISVVSHIGSSPNSGHYISDVYDFQKQAWFTYNDLCVSEISETKMQEARLHSGYIFFYMHNGIFEELLRKAENSRLPSTQAGVIPQGEYEGDSLYRPA

SEQ ID NO: 55 - protein, 1406 aa, Homo sapiens
MDMVENADSLQAQERKDILMKYDKGHRAGLPEDKGPEPVGINSSIDRFGILHETELPPVTAREAKKIRREMTRTSKWMEMLGEWETYKHSSKLIDRVYKGIPMNIRGPVWSVLLNIQEIKLKNPGRYQIMKERGKRSSEHIHHIDLDVRTTLRNHVFFRDRYGAKQRELFYILLAYSEYNPEVGYCRDLSHITALFLLYLPEEDAFWALVQLLASERHSLPGFHSPNGGTVQGLQDQQEHVVPKSQPKTMWHQDKEGLCGQCASLGCLLRNLIDGISLGLTLRLWDVYLVEGEQVLMPITSIALKVQQKRLMKTSRCGLWARLRNQFFDTWAMNDDTVLKHLRASTKKLTRKQGDLPPPAKREQGSLAPRPVPASRGGKTLCKGYRQAPPGPPAQFQRPICSASPPWASRFSTPCPGGAVREDTYPVGTQGVPSLALAQGGPQGSWRFLEWKSMPRLPTDLDIGGPWFPHYDFEWSCWVRAISQEDQLATCWQAEHCGEVHNKDMSWPEEMSFTANSSKIDRQKVPTEKGATGLSNLGNTCFMNSSIQCVSNTQPLTQYFISGRHLYELNRTNPIGMKGHMAKCYGDLVQELWSGTQKSVAPLKLRRTIAKYAPKFDGFQQQDSQELLAFLLDGLHEDLNRVHEKPYVELKDSDGRPDWEVAAEAWDNHLRRNRSIIVDLFHGQLRSQVKCKTCGHISVRFDPFNFLSLPLPMDSYMDLEITVIKLDGTTPVRYGLRLNMDEKYTGLKKQLRDLCGLNSEQILLAEVHDSNIKNFPQDNQKVQLSVSGFLCAFEIPVPSSPISASSPTQIDFSSSPSTNGMFTLTTNGDLPKPIFIPNGMPNTVVPCGTEKNFTNGMVNGHMPSLPDSPFTGYIIAVHRKMMRTELYFLSPQENRPSLFGMPLIVPCTVHTRKKDLYDAVWIQVSWLARPLPPQEASIHAQDRDNCMGYQYPFTLRVVQKDGNSCAWCPQYRFCRGCKIDCGEDRAFIGNAYIAVDWHPTALHLRYQTSQERVVDKHESVEQSRRAQAEPINLDSCLRAFTSEEELGESEMYYCSKCKTHCLATKKLDLWRLPPFLIIHLKRFQFVNDQWIKSQKIVRFLRESFDPSAFLVPRDPALCQHKPLTPQGDELSKPRILAREVKKVDAQSSAGKEDMLLSKSPSSLSANISSSPKGSPSSSRKSGTSCPSSKNSSPNSSPRTLGRSKGRLRLPQIGSKNKPSSSKKNLDASKENGAGQICELADALSRGHMRGGSQPELVTPQDHEVALANGFLYEHEACGNGCGDGYSNGQLGNHSEEDSTDDQREDTHIKPIYNLYAISCHSGILSGGHYITYAKNPNCKWYCYNDSSCEELHPDEIDTDSAYILFYEQQGIDYAQFLPKIDGKKMADTSSTDEDSESDYEKYSMLQ

SEQ ID NO: 56 - protein, 1073 aa, Homo sapiens
MAWVKFLRKPGGNLGKVYQPGSMLSLAPTKGLLNEPGQNSCFLNSAVQVLWQLDIFRRSLRVLTGHVCQGDACIFCALKTIFAQFQHSREKALPSDNIRHALAESFKDEQRFQLGLMDDAAECFENMLERIHFHIVPSRDADMCTSKSCITHQKFAMTLYEQCVCRSCGASSDPLPFTEFVRYISTTALCNEVERMLERHERFKPEMFAELLQAANTTDDYRKCPSNCGQKIKIRRVLMNCPEIVTIGLVWDSEHSDLTEAVVRNLATHLYLPGLFYRVTDENAKNSELNLVGMICYTSQHYCAFAFHTKSSKWVFFDDANVKEIGTRWKDVVSKCIRCHFQPLLLFYANPDGTAVSTEDALRQVISWSHYKSVAENMGCEKPVIHKSDNLKENGFGDQAKQRENQKFPTDNISSSNRSHSHTGVGKGPAKLSHIDQREKIKDISRECALKAIEQKNLLSSQRKDLEKGQRKDLGRHRDLVDEDLSHFQSGSPPAPNGFKQHGNPHLYHSQGKGSYKHDRVVPQSRASAQIISSSKSQILAPGEKITGKVKSDNGTGYDTDSSQDSRDRGNSCDSSSKSRNRGWKPMRETLNVDSIFSESEKRQHSPRHKPNISNKPKSSKDPSFSNWPKENPKQKGLMTIYEDEMKQEIGSRSSLESNGKGAEKNKGLVEGKVHGDNWQMQRTESGYESSDHISNGSTNLDSPVIDGNGTVMDISGVKETVCFSDQITTSNLNKERGDCTSLQSQHHLEGFRKELRNLEAGYKSHEFHPESHLQIKNHLIKRSHVHEDNGKLFPSSSLQIPKDHNAREHIHQSDEQKLEKPNECKFSEWLNIENSERTGLPFHVDNSASGKRVNSNEPSSLWSSHLRTVGLKPETAPLIQQQNIMDQCYFENSLSTECIIRSASRSDGCQMPKLFCQNLPPPLPPKKYAITSVPQSEKSESTPDVKLTEVFKATSHLPKHSLSTASEPSLEVSTHMNDERHKETFQVRECFGNTPNCPSSSSTNDFQANSGAIDAFCQPELDSISTCPNETVSLTTYFSVDSCMTDTYRLKYHQRPKLSFPESSGFCNNSLS

SEQ ID NO: 57 - protein, 530 aa, Homo sapiens
MEDDSLYLRGEWQFNHFSKLTSSRPDAAFAEIQRTSLPEKSPLSCETRVDLCDDLAPVARQLAPREKLPLSSRRPAAVGAGLQNMGNTCYVNASLQCLTYTPPLANYMLSREHSQTCHRHKGCMLCTMQAHITRALHNPGHVIQPSQALAAGFHRGKQEDAHEFLMFTVDAMKKACLPGHKQVDHHSKDTTLIHQIFGGYWRSQIKCLHCHGISDTFDPYLDIALDIQAAQSVQQALEQLVKPEELNGENAYHCGVCLQRAPASKTLTLHTSAKVLILVLKRFSDVTGNKIAKNVQYPECLDMQPYMSQPNTGPLVYVLYAVLVHAGWSCHNGHYFSYVKAQEGQWYKMDDAEVTASSITSVLSQQAYVLFYIQKSEWERHSESVSRGREPRALGAEDTDRRATQGELKRDHPCLQAPELDEHLVERATQESTLDHWKFLQEQNKTKPEFNVRKVEGTLPPDVLVIHQSKYKCGMKNHHPEQQSSLLNLSSSTPTHQESMNTGTLASLRGRARRSKGKNKHSKRALLVCQ

SEQ ID NO: 58 - protein, 858 aa, Homo sapiens
MAELSEEALLSVLPTIRVPKAGDRVHKDECAFSFDTPESEGGLYICMNTFLGFGKQYVERHFNKTGQRVYLHLRRTRRPKEEDPATGTGDPPRKKPTRLAIGVEGGFDLSEEKFELDEDVKIVILPDYLEIARDGLGGLPDIVRDRVTSAVEALLSADSASRKQEVQAWDGEVRQVSKHAFSLKQLDNPARIPPCGWKCSKCDMRENLWLNLTDGSILCGRRYFDGSGGNNHAVEHYRETGYPLAVKLGTITPDGADVYSYDEDDMVLDPSLAEHLSHFGIDMLKMQKTDKTMTELEIDMNQRIGEWELIQESGVPLKPLFGPGYTGIRNLGNSCYLNSVVQVLFSIPDFQRKYVDKLEKIFQNAPTDPTQDFSTQVAKLGHGLLSGEYSKPVPESGDGERVPEQKEVQDGIAPRMFKALIGKGHPEFSTNRQQDAQEFFLHLINMVERNCRSSENPNEVFRFLVEEKIKCLATEKVKYTQRVDYIMQLPVPMDAALNKEELLEYEEKKRQAEEEKMALPELVRAQVPFSSCLEAYGAPEQVDDFWSTALQAKSVAVKTTRFASFPDYLVIQIKKFTFGLDWVPKKLDVSIEMPEELDISQLRGTGLQPGEEELPDIAPPLVTPDEPKGSLGFYGNEDEDSFCSPHFSSPTSPMLDESVIIQLVEMGFPMDACRKAVYYTGNSGAEAAMNWVMSHMDDPDFANPLILPGSSGPGSTSAAADPPPEDCVTTIVSMGFSRDQALKALRATNNSLERAVDWIFSHIDDLDAEAAMDISEGRSAADSISESVPVGPKVRDGPGKYQLFAFISHMGTSTMCGHYVCHIKKEGRWVIYNDQKVCASEKPPKDLGYIYFYQRVAS

SEQ ID NO: 59 - protein, 1055 aa, Homo sapiens
MTVEQNVLQQSAAQKHQQTFLNQLREITGINDTQILQQALKDSNGNLELAVAFLTAKNAKTPQQEETTYYQTALPGNDRYISVGSQADTNVIDLTGDDKDDLQRAIALSLAESNRAFRETGITDEEQAISRVLEASIAENKACLKRTPTEVWRDSRNPYDRKRQDKAPVGLKNVGNTCWFSAVIQSLFNLLEFRRLVLNYKPPSNAQDLPRNQKEHRNLPFMRELRYLFALLVGTKRKYVDPSRAVEILKDAFKSNDSQQQDVSEFTHKLLDWLEDAFQMKAEEETDEEKPKNPMVELFYGRFLAVGVLEGKKFENTEMFGQYPLQVNGFKDLHECLEAAMIEGEIESLHSENSGKSGQEHWFTELPPVLTFELSRFEFNQALGRPEKIHNKLEFPQVLYLDRYMHRNREITRIKREEIKRLKDYLTVLQQRLERYLSYGSGPKRFPLVDVLQYALEFASSKPVCTSPVDDIDASSPPSGSIPSQTLPSTTEQQGALSSELPSTSPSSVAAISSRSVIHKPFTQSRIPPDLPMHPAPRHITEEELSVLESCLHRWRTEIENDTRDLQESISRIHRTIELMYSDKSMIQVPYRLHAVLVHEGQANAGHYWAYIFDHRESRWMKYNDIAVTKSSWEELVRDSFGGYRNASAYCLMYINDKAQFLIQEEFNKETGQPLVGIETLPPDLRDFVEEDNQRFEKELEEWDAQLAQKALQEKLLASQKLRESETSVTTAQAAGDPEYLEQPSRSDFSKHLKEETIQIITKASHEHEDKSPETVLQSAIKLEYARLVKLAQEDTPPETDYRLHHVVVYFIQNQAPKKIIEKTLLEQFGDRNLSFDERCHNIMKVAQAKLEMIKPEEVNLEEYEEWHQDYRKFRETTMYLIIGLENFQRESYIDSLLFLICAYQNNKELLSKGLYRGHDEELISHYRRECLLKLNEQAAELFESGEDREVNNGLIIMNEFIVPFLPLLLVDEMEEKDILAVEDMRNRWCSYLGQEMEPHLQEKLTDFLPKLLDCSMEIKSFHEPPKLPSYSTHELCERFARIMLSLSRTPADGR

SEQ ID NO: 60 - protein, 942 aa, Homo sapiens
MTGSNSHITILTLKVLPHFESLGKQEKIPNKMSAFRNHCPHLDSVGEITKEDLIQKSLGTCQDCKVQGPNLWACLENRCSYVGCGESQVDHSTIHSQETKHYLTVNLTTLRVWCYACSKEVFLDRKLGTQPSLPHVRQPHQIQENSVQDFKIPSNTTLKTPLVAVFDDLDIEADEEDELRARGLTGLKNIGNTCYMNAALQALSNCPPLTQFFLDCGGLARTDKKPAICKSYLKLMTELWHKSRPGSVVPTTLFQGIKTVNPTFRGYSQQDAQEFLRCLMDLLHEELKEQVMEVEEDPQTITTEETMEEDKSQSDVDFQSCESCSNSDRAENENGSRCFSEDNNETTMLIQDDENNSEMSKDWQKEKMCNKINKVNSEGEFDKDRDSISETVDLNNQETVKVQIHSRASEYITDVHSNDLSTPQILPSNEGVNPRLSASPPKSGNLWPGLAPPHKKAQSASPKRKKQHKKYRSVISDIFDGTIISSVQCLTCDRVSVTLETFQDLSLPIPGKEDLAKLHSSSHPTSIVKAGSCGEAYAPQGWIAFFMEYVKRFVVSCVPSWFWGPVVTLQDCLAAFFARDELKGDNMYSCEKCKKLRNGVKFCKVQNFPEILCIHLKRFRHELMFSTKISTHVSFPLEGLDLQPFLAKDSPAQIVTYDLLSVICHHGTASSGHYIAYCRNNLNNLWYEFDDQSVTEVSESTVQNAEAYVLFYRKSSEEAQKERRRISNLLNIMEPSLLQFYISRQWLNKFKTFAEPGPISNNDFLCIHGGVPPRKAGYIEDLVLMLPQNIWDNLYSRYGGGPAVNHLYICHTCQIEAEKIEKRRKTELEIFIRLNRAFQKEDSPATFYCISMQWFREWESFVKGKDGDPPGPIDNTKIAVTKCGNVMLRQGADSGQISEETWNFLQSIYGGGPEVILRPPVVHVDPDILQAEEKIEVETRSL

SEQ ID NO: 61 - protein, 565 aa, Homo sapiens
MPQASEHRLGRTREPPVNIQPRVGSKLPFAPRARSKERRNPASGPNPMLRPLPPRPGLPDERLKKLELGRGRTSGPRPRGPLRADHGVPLPGSPPPTVALPLPSRTNLARSKSVSSGDLRPMGIALGGHRGTGELGAALSRLALRPEPPTLRRSTSLRRLGGFPGPPTLFSIRTEPPASHGSFHMISARSSEPFYSDDKMAHHTLLLGSGHVGLRNLGNTCFLNAVLQCLSSTRPLRDFCLRRDFRQEVPGGGRAQELTEAFADVIGALWHPDSCEAVNPTRFRAVFQKYVPSFSGYSQQDAQEFLKLLMERLHLEINRRGRRAPPILANGPVPSPPRRGGALLEEPELSDDDRANLMWKRYLEREDSKIVDLFVGQLKSCLKCQACGYRSTTFEVFCDLSLPIPKKGFAGGKVSLRDCFNLFTKEEELESENAPVCDRCRQKTRSTKKLTVQRFPRILVLHLNRFSASRGSIKKSSVGVDFPLQRLSLGDFASDKAGSPVYQLYALCNHSGSVHYGHYTALCRCQTGWHVYNDSRVSPVSENQVASSEGYVLFYQLMQEPPRCL

SEQ ID NO: 62 - protein, 530 aa, Homo sapiens
MGDDSLYLGGEWQFNHFSKLTSSRPDAAFAEIQRTSLPEKSPLSSETRVDLCDDLAPVARQLAPREKLPLSSRRPAAVGAGLQNMGNTCYENASLQCLTYTLPLANYMLSREHSQTCQRPKCCMLCTMQAHITWALHSPGHVIQPSQALAAGFHRGKQEDVHEFLMFTVDAMKKACLPGHKQVDHHSKDTTLIHQIFGGCWRSQIKCLHCHGISDTFDPYLDIALDIQAAQSVKQALEQLVKPEELNGENAYHCGLCLQRAPASNTLTLHTSAKVLILVLKRFSDVAGNKLAKNVQYPECLDMQPYMSQQNTGPLVYVLYAVLVHAGWSCHDGYYFSYVKAQEGQWYKMDDAEVTVCSITSVLSQQAYVLFYIQKSEWERHSESVSRGREPRALGAEDTDRPATQGELKRDHPCLQVPELDEHLVERATEESTLDHWKFPQEQNKMKPEFNVRKVEGTLPPNVLVIHQSKYKCGMKNHHPEQQSSLLNLSSMNSTDQESMNTGTLASLQGRTRRSKGKNKHSKRSLLVCQ

SEQ ID NO: 63 - protein, 530 aa, Homo sapiens
MEDDSLYLGGEWQFNHFSKLTSSRPDAAFAEIQRTSLPEKSPLSCETRVDLCDDLAPVARQLAPREKLPLSSRRPAAVGAGLQNMGNTCYVNASLQCLTYTPPLANYMLSREHSQTCHRHKGCMLCTMQAHITRALHNPGHVIQPSQALAAGFHRGKQEDAHEFLMFTVDAMKKACLPGHKQVDHHSKDTTLIHQIFGGYWRSQIKCLHCHGISDTFDPYLDIALDIQAAQSVQQALEQLVKPEELNGENAYHCGVCLQRAPASKTLTLHTSAKVLILVLKRFSDVTGNKIAKNVQYPECLDMQPYMSQPNTGPLVYVLYAVLVHAGWSCHNGHYFSYVKAQEGQWYKMDDAEVTASSITSVLSQQAYVLFYIQKSEWERHSESVSRGREPRALGAEDTDRRATQGELKRDHPCLQAPELDEHLVERATQESTLDHWKFLQEQNKTKPEFNVRKVEGTLPPDVLVIHQSKYKCGMKNHHPEQQSSLLNLSSTTPTHQESMNTGTLASLRGRARRSKGKNKHSKRALLVCQ

SEQ ID NO: 64 - protein, 370 aa, Homo sapiens
MEILMTVSKFASICTMGANASALEKEIGPEQFPVNEHYFGLVNFGNTCYCNSVLQALYFCRPFREKVLAYKSQPRKKESLLTCLADLFHSIATQKKKVGVIPPKKFITRLRKENELFDNYMQQDAHEFLNYLLNTIADILQEERKQEKQNGRLPNGNIDNENNNSTPDPTWVHEIFQGTLTNETRCLTCETISSKDEDFLDLSVDVEQNTSITHCLRGFSNTETLCSEYKYYCEECRSKQEAHKRMKVKKLPMILALHLKRFKYMDQLHRYTKLSYRVVFPLELRLFNTSGDATNPDRMYDLVAVVVHCGSGPNRGHYIAIVKSHDFWLLFDDDIVEKIDAQAIEEFYGLTSDISKNSESGYILFYQSRD

SEQ ID NO: 65 - protein, 530 aa, Homo sapiens
MEEDSLYLGGEWQFNHFSKLTSSRPDAAFAEIQRTSLPEKSPLSCETRVDLCDDLAPVARQLAPREKLPLSNRRPAAVGAGLQNMGNTCYVNASLQCLTYTPPLANYMLSREHSQTCHRHKGCMLCTMQAHITRALHNPGHVIQPSQALAAGFHRGKQEDAHEFLMFTVDAMKKACLPGHKQVDHHSKDTTLIHQIFGGYWRSQIKCLHCHGISDTFDPYLDIALDIQAAQSVQQALEQLVKPEELNGENAYHCGVCLQRAPASKMLTLLTSAKVLILVLKRFSDVTGNKIAKNVQYPECLDMQPYMSQPNTGPLVYVLYAVLVHAGWSCHNGHYFSYVKAQEGQWYKMDDAEVTASSITSVLSQQAYVLFYIQKSEWERHSESVSRGREPRALGAEDTDRRATQGELKRDHPCLQAPELDEHLVERATQESTLDHWKFLQEQNKTKPEFNVRKVEGTLPPDVLVIHQSKYKCGMKNHHPEQQSSLLKLSSTTPTHQESMNTGTLASLRGRARRSKGKNKHSKRALLVCQ

SEQ ID NO: 66 - protein, 914 aa, Homo sapiens
MGDSRDLCPHLDSIGEVTKEDLLLKSKGTCQSCGVTGPNLWACLQVACPYVGCGESFADHSTIHAQAKKHNLTVNLTTFRLWCYACEKEVFLEQRLAAPLLGSSSKFSEQDSPPPSHPLKAVPIAVADEGESESEDDDLKPRGLTGMKNLGNSCYMNAALQALSNCPPLTQFFLECGGLVRTDKKPALCKSYQKLVSEVWHKKRPSYVVPTSLSHGIKLVNPMFRGYAQQDTQEFLRCLMDQLHEELKEPVVATVALTEARDSDSSDTDEKREGDRSPSEDEFLSCDSSSDRGEGDGQGRGGGSSQAETELLIPDEAGRAISEKERMKDRKFSWGQQRTNSEQVDEDADVDTAMAALDDQPAEAQPPSPRSSSPCRTPEPDNDAHLRSSSRPCSPVHHHEGHAKLSSSPPRASPVRMAPSYVLKKAQVLSAGSRRRKEQRYRSVISDIFDGSILSLVQCLTCDRVSTTVETFQDLSLPIPGKEDLAKLHSAIYQNVPAKPGACGDSYAAQGWLAFIVEYIRRFVVSCTPSWFWGPVVTLEDCLAAFFAADELKGDNMYSCERCKKLRNGVKYCKVLRLPEILCIHLKRFRHEVMYSFKINSHVSFPLEGLDLRPFLAKECTSQITTYDLLSVICHHGTAGSGHYIAYCQNVINGQWYEFDDQYVTEVHETVVQNAEGYVLFYRKSSEEAMRERQQVVSLAAMREPSLLRFYVSREWLNKFNTFAEPGPITNQTFLCSHGGIPPHKYHYIDDLVVILPQNVWEHLYNRFGGGPAVNHLYVCSICQVEIEALAKRRRIEIDTFIKLNKAFQAEESPGVIYCISMQWFREWEAFVKGKDNEPPGPIDNSRIAQVKGSGHVQLKQGADYGQISEETWTYLNSLYGGGPEIAIRQSVAQPLGPENLHGEQKIEAETRAV

SEQ ID NO: 67 - protein, 366 aa, Homo sapiens
MTVRNIASICNMGTNASALEKDIGPEQFPINEHYFGLVNFGNTCYCNSVLQALYFCRPFRENVLAYKAQQKKKENLLTCLADLFHSIATQKKKVGVIPPKKFISRLRKENDLFDNYMQQDAHEFLNYLLNTIADILQEEKKQEKQNGKLKNGNMNEPAENNKPELTWVHEIFQGTLTNETRCLNCETVSSKDEDFLDLSVDVEQNTSITHCLRDFSNTETLCSEQKYYCETCCSKQEAQKRMRVKKLPMILALHLKRFKYMEQLHRYTKLSYRVVFPLELRLFNTSSDAVNLDRMYDLVAVVVHCGSGPNRGHYITIVKSHGFWLLFDDDIVEKIDAQAIEEFYGLTSDISKNSESGYILFYQSRE

SEQ ID NO: 68 - protein, 956 aa, Homo sapiens
MSSGLWSQEKVTSPYWEERIFYLLLQECSVTDKQTQKLLKVPKGSIGQYIQDRSVGHSRIPSAKGKKNQIGLKILEQPHAVLFVDEKDVVEINEKFTELLLAITNCEERFSLFKNRNRLSKGLQIDVGCPVKVQLRSGEEKFPGVVRFRGPLLAERTVSGIFFGVELLEEGRGQGFTDGVYQGKQLFQCDEDCGVFVALDKLELIEDDDTALESDYAGPGDTMQVELPPLEINSRVSLKVGETIESGTVIFCDVLPGKESLGYFVGVDMDNPIGNWDGRFDGVQLCSFACVESTILLHINDIIPALSESVTQERRPPKLAFMSRGVGDKGSSSHNKPKATGSTSDPGNRNRSELFYTLNGSSVDSQPQSKSKNTWYIDEVAEDPAKSLTEISTDFDRSSPPLQPPPVNSLTTENRFHSLPFSLTKMPNTNGSIGHSPLSLSAQSVMEELNTAPVQESPPLAMPPGNSHGLEVGSLAEVKENPPFYGVIRWIGQPPGLNEVLAGLELEDECAGCTDGTFRGTRYFTCALKKALFVKLKSCRPDSRFASLQPVSNQIERCNSLAFGGYLSEVVEENTPPKMEKEGLEIMIGKKKGIQGHYNSCYLDSTLFCLFAFSSVLDTVLLRPKEKNDVEYYSETQELLRTEIVNPLRIYGYVCATKIMKLRKILEKVEAASGFTSEEKDPEEFLNILFHHILRVEPLLKIRSAGQKVQDCYFYQIFMEKNEKVGVPTIQQLLEWSFINSNLKFAEAPSCLIIQMPRFGKDFKLFKKIFPSLELNITDLLEDTPRQCRICGGLAMYECRECYDDPDISAGKIKQFCKTCNTQVHLHPKRLNHKYNPVSLPKDLPDWDWRHGCIPCQNMELFAVLCIETSHYVAFVKYGKDDSAWLFFDSMADRDGGQNGFNIPQVTPCPEVGEYLKMSLEDLHSLDSRRIQGCARRLLCDAYMCMYQSPTMSLYK

SEQ ID NO: 69 - protein, 823 aa, Homo sapiens
MGKKRTKGKTVPIDDSSETLEPVCRHIRKGLEQGNLKKALVNVEWNICQDCKTDNKVKDKAEEETEEKPSVWLCLKCGHQGCGRNSQEQHALKHYLTPRSEPHCLVLSLDNWSVWCYVCDNEVQYCSSNQLGQVVDYVRKQASITTPKPAEKDNGNIELENKKLEKESKNEQEREKKENMAKENPPMNSPCQITVKGLSNLGNTCFFNAVMQNLSQTPVLRELLKEVKMSGTIVKIEPPDLALTEPLEINLEPPGPLTLAMSQFLNEMQETKKGVVTPKELFSQVCKKAVRFKGYQQQDSQELLRYLLDGMRAEEHQRVSKGILKAFGNSTEKLDEELKNKVKDYEKKKSMPSFVDRIFGGELTSMIMCDQCRTVSLVHESFLDLSLPVLDDQSGKKSVNDKNLKKTVEDEDQDSEEEKDNDSYIKERSDIPSGTSKHLQKKAKKQAKKQAKNQRRQQKIQGKVLHLNDICTIDHPEDSEYEAEMSLQGEVNIKSNHISQEGVMHKEYCVNQKDLNGQAKMIESVTDNQKSTEEVDMKNINMDNDLEVLTSSPTRNLNGAYLTEGSNGEVDISNGFKNLNLNAALHPDEINIEILNDSHTPGTKVYEVVNEDPETAFCTLANREVFNTDECSIQHCLYQFTRNEKLRDANKLLCEVCTRRQCNGPKANIKGERKHVYTNAKKQMLISLAPPVLTLHLKRFQQAGFNLRKVNKHIKFPEILDLAPFCTLKCKNVAEENTRVLYSLYGVVEHSGTMRSGHYTAYAKARTANSHLSNLVLHGDIPQDFEMESKGQWFHISDTHVQAVPTTKVLNSQAYLLFYERIL

SEQ ID NO: 70 - protein, 1137 aa, Homo sapiens
MKCVFVTVGTTSFDDLIACVSAPDSLQKIESLGYNRLILQIGRGTVVPEPFSTESFTLDVYRYKDSLKEDIQKADLVISHAGAGSCLETLEKGKPLVVVINEKLMNNHQLELAKQLHKEGHLFYCTCRVLTCPGQAKSIASAPGKCQDSAALTSTAFSGLDFGLLSGYLHKQALVTATHPTCTLLFPSCHAFFPLPLTPTLYKMHKGWKNYCSQKSLNEASMDEYLGSLGLFRKLTAKDASCLFRAISEQLFCSQVHHLEIRKACVSYMRENQQTFESYVEGSFEKYLERLGDPKESAGQLEIRALSLIYNRDFILYRFPGKPPTYVTDNGYEDKILLCYSSSGHYDSVYSKQFQSSAAVCQAVLYEILYKDVFVVDEEELKTAIKLFRSGSKKNRNNAVTGSEDAHTDYKSSNQNRMEEWGACYNAENIPEGYNKGTEETKSPENPSKMPFPYKVLKALDPEIYRNVEFDVWLDSRKELQKSDYMEYAGRQYYLGDKCQVCLESEGRYYNAHIQEVGNENNSVTVFIEELAEKHVVPLANLKPVTQVMSVPAWNAMPSRKGRGYQKMPGGYVPEIVISEMDIKQQKKMFKKIRGKEVYMTMAYGKGDPLLPPRLQHSMHYGHDPPMHYSQTAGNVMSNEHFHPQHPSPRQGRGYGMPRNSSRFINRHNMPGPKVDFYPGPGKRCCQSYDNFSYRSRSFRRSHRQMSCVNKESQYGFTPGNGQMPRGLEETITFYEVEEGDETAYPTLPNHGGPSTMVPATSGYCVGRRGHSSGKQTLNLEEGNGQSENGRYHEEYLYRAEPDYETSGVYSTTASTANLSLQDRKSCSMSPQDTVTSYNYPQKMMGNIAAVAASCANNVPAPVLSNGAAANQAISTTSVSSQNAIQPLFVSPPTHGRPVIASPSYPCHSAIPHAGASLPPPPPPPPPPPPPPPPPPPPPPPPPPPALDVGETSNLQPPPPLPPPPYSCDPSGSDLPQDTKVLQYYFNLGLQCYYHSYWHSMVYVPQMQQQLHVENYPVYTEPPLVDQTVPQCYSEVRREDGIQAEASANDTFPNADSSSVPHGAVYYPVMSDPYGQPPLPGFDSCLPVVPDYSCVPPWHPVGTAYGGSSQIHGAINPGPIGCIAPSPPASHYVPQGM

SEQ ID NO: 71 - protein, 348 aa, Homo sapiens
MFGPAKGRHFGVHPAPGFPGGVSQQAAGTKAGPAGAWPVGSRTDTMWRLRCKAKDGTHVLQGLSSRTRVRELQGQIAAITGIAPGGQRILVGYPPECLDLSNGDTILEDLPIQSGDMLIIEEDQTRPRSSPAFTKRGASSYVRETLPVLTRTVVPADNSCLFTSVYYVVEGGVLNPACAPEMRRLIAQIVASDPDFYSEAILGKTNQEYCDWIKRDDTWGGAIEISILSKFYQCEICVVDTQTVRIDRFGEDAGYTKRVLLIYDGIHYDPLQRNFPDPDTPPLTIFSSNDDIVLVQALELADEARRRRQFTDVNRFTLRCMVCQKGLTGQAEAREHAKETGHTNFGEV

SEQ ID NO: 72 - protein, 481 aa, Homo sapiens
MQLYSSVCTHYPAGAPGPTAAAPAPPAAATPFKVSLQPPGAAGAAPEPETGECQPAAAAEHREAAAVPAAKMPAFSSCFEVVSGAAAPASAAAGPPGASCKPPLPPHYTSTAQITVRALGADRLLLHGPDPVPGAAGSAAAPRGRCLLLAPAPAAPVPPRRGSSAWLLEELLRPDCPEPAGLDATREGPDRNFRLSEHRQALAAAKHRGPAATPGSPDPGPGPWGEEHLAERGPRGWERGGDRCDAPGGDAARRPDPEAEAPPAGSIEAAPSSAAEPVIVSRSDPRDEKLALYLAEVEKQDKYLRQRNKYRFHIIPDGNCLYRAVSKTVYGDQSLHRELREQTVHYIADHLDHFSPLIEGDVGEFIIAAAQDGAWAGYPELLAMGQMLNVNIHLTTGGRLESPTVSTMIHYLGPEDSLRPSIWLSWLSNGHYDAVFDHSYPNPEYDNWCKQTQVQRKRDEELAKSMAISLSKMYIEQNACS

SEQ ID NO: 73 - protein, 293 aa, Homo sapiens
MEAVLTEELDEEEQLLRRHRKEKKELQAKIQGMKNAVPKNDKKRRKQLTEDVAKLEKEMEQKHREELEQLKLTTKENKIDSVAVNISNLVLENQPPRISKAQKRREKKAALEKEREERIAEAEIENLTGARHMESEKLAQILAARQLEIKQIPSDGHCMYKAIEDQLKEKDCALTVVALRSQTAEYMQSHVEDFLPFLTNPNTGDMYTPEEFQKYCEDIVNTAAWGGQLELRALSHILQTPIEIIQADSPPIIVGEEYSKKPLILVYMRHAYGLGEHYNSVTRLVNIVTENCS

SEQ ID NO: 74 - protein, 288 aa, Homo sapiens
MDDPKSEQQRILRRHQRERQELQAQIRSLKNSVPKTDKTKRKQLLQDVARMEAEMAQKHRQELEKFQDDSSIESVVEDLAKMNLENRPPRSSKAHRKRERMESEERERQESIFQAEMSEHLAGFKREEEEKLAAILGARGLEMKAIPADGHCMYRAIQDQLVFSVSVEMLRCRTASYMKKHVDEFLPFFSNPETSDSFGYDDFMIYCDNIVRTTAWGGQLELRALSHVLKTPIEVIQADSPTLIIGEEYVKKPIILVYLRYAYSLGEHYNSVTPLEAGAAGGVLPRLL

SEQ ID NO: 75 - protein, 271 aa, Homo sapiens
MAAEEPQQQKQEPLGSDSEGVNCLAYDEAIMAQQDRIQQEIAVQNPLVSERLELSVLYKEYAEDDNIYQQKIKDLHKKYSYIRKTRPDGNCFYRAFGFSHLEALLDDSKELQRFKAVSAKSKEDLVSQGFTEFTIEDFHNTFMDLIEQVEKQTSVADLLASFNDQSTSDYLVVYLRLLTSGYLQRESKFFEHFIEGGRTVKEFCQQEVEPMCKESDHIHIIALAQALSVSIQVEYMDRGEGGTTNPHIFPEGSEPKVYLLYRPGHYDILYK

SEQ ID NO: 76 - protein, 926 aa, Homo sapiens
MVSSVLPNPTSAECWAALLHDPMTLDMDAVLSDFVRSTGAEPGLARDLLEGKNWDLTAALSDYEQLRQVHTANLPHVFNEGRGPKQPEREPQPGHKVERPCLQRQDDIAQEKRLSRGISHASSAIVSLARSHVASECNNEQFPLEMPIYTFQLPDLSVYSEDFRSFIERDLIEQATMVALEQAGRLNWWSTVCTSCKRLLPLATTGDGNCLLHAASLGMWGFHDRDLVLRKALYTMMRTGAEREALKRRWRWQQTQQNKEEEWEREWTELLKLASSEPRTHFSKNGGTGGGVDNSEDPVYESLEEFHVFVLAHILRRPIVVVADTMLRDSGGEAFAPIPFGGIYLPLEVPPNRCHCSPLVLAYDQAHFSALVSMEQRDQQREQAVIPLTDSEHKLLPLHFAVDPGKDWEWGKDDNDNARLAHLILSLEAKLNLLHSYMNVTWIRIPSETRAPLAQPESPTASAGEDVQSLADSLDSDRDSVCSNSNSNNGKNGKDKEKEKQRKEKDKTRADSVANKLGSFSKTLGIKLKKNMGGLGGLVHGKMGRANSANGKNGDSAERGKEKKAKSRKGSKEESGASASTSPSEKTTPSPTDKAAGASPAEKGGGPRGDAWKYSTDVKLSLNILRAAMQGERKFIFAGLLLTSHRHQFHEEMIGYYLTSAQERFSAEQEQRRRDAATAAAAAAAAAAATAKRPPRRPETEGVPVPERASPGPPTQLVLKLKERPSPGPAAGRAARAAAGGTASPGGGARRASASGPVPGRSPPAPARQSVIHVQASGARDEACAPAVGALRPCATYPQQNRSLSSQSYSPARAAALRTVNTVESLARAVPGALPGAAGTAGAAEHKSQTYTNGFGALRDGLEFADADAPTARSNGECGRGGPGPVQRRCQRENCAFYGRAETEHYCSYCYREELRRRREARGARP

SEQ ID NO: 77 - protein, 1113 aa, Homo sapiens
MEAAVGVPDGGDQGGAGPREDATPMDAYLRKLGLYRKLVAKDGSCLFRAVAEQVLHSQSRHVEVRMACIHYLRENREKFEAFIEGSFEEYLKRLENPQEWVGQVEISALSLMYRKDFIIYREPNVSPSQVTENNFPEKVLLCFSNGNHYDIVYPIKYKESSAMCQSLLYELLYEKVFKTDVSKIVMELDTLEVADEDNSEISDSEDDSCKSKTAAAAADVNGFKPLSGNEQLKNNGNSTSLPLSRKVLKSLNPAVYRNVEYEIWLKSKQAQQKRDYSIAAGLQYEVGDKCQVRLDHNGKFLNADVQGIHSENGPVLVEELGKKHTSKNLKAPPPESWNTVSGKKMKKPSTSGQNFHSDVDYRGPKNPSKPIKAPSALPPRLQHPSGVRQHAFSSHSSGSQSQKFSSEHKNLSRTPSQIIRKPDRERVEDFDHTSRESNYFGLSPEERREKQAIEESRLLYEIQNRDEQAFPALSSSSVNQSASQSSNPCVQRKSSHVGDRKGSRRRMDTEERKDKDSIHGHSQLDKRPEPSTLENITDDKYATVSSPSKSKKLECPSPAEQKPAEHVSLSNPAPLLVSPEVHLTPAVPSLPATVPAWPSEPTTFGPTGVPAPIPVLSVTQTLTTGPDSAVSQAHLTPSPVPVSIQAVNQPLMPLPQTLSLYQDPLYPGFPCNEKGDRAIVPPYSLCQTGEDLPKDKNILRFFFNLGVKAYSCPMWAPHSYLYPLHQAYLAACRMYPKVPVPVYPHNPWFQEAPAAQNESDCTCTDAHFPMQTEASVNGQMPQPEIGPPTFSSPLVIPPSQVSESHGQLSYQADLESETPGQLLHADYEESLSGKNMFPQSFGPNPFLGPVPIAPPFFPHVWYGYPFQGFIENPVMRQNIVLPSDEKGELDLSLENLDLSKDCGSVSTVDEFPEARGEHVHSLPEASVSSKPDEGRTEQSSQTRKADTALASIPPVAEGKAHPPTQILNRERETVPVELEPKRTIQSLKEKTEKVKDPKTAADVVSPGANSVDSRVQRPKEESSEDENEVSNILRSGRSKQFYNQTYGSRKYKSDWGYSGRGGYQHVRSEESWKGQPSRSRDEGYQYHRNVRGRPFRGDRRRSGMGDGHRGQHT

SEQ ID NO: 78 - protein, 234 aa, Homo sapiens
MSETSFNLISEKCDILSILRDHPENRIYRRKIEELSKRFTAIRKTKGDGNCFYRALGYSYLESLLGKSREIFKFKERVLQTPNDLLAAGFEEHKFRNFFNAFYSVVELVEKDGSVSSLLKVFNDQSASDHIVQFLRLLTSAFIRNRADFFRHFIDEEMDIKDFCTHEVEPMATECDHIQITALSQALSIALQVEYVDEMDTALNHHVFPEAATPSVYLLYKTSHYNILYAADKH

SEQ ID NO: 79 - protein, 398 aa, Homo sapiens
MSRKQAAKSRPGSGSRKAEAERKRDERAARRALAKERRNRPESGGGGGCEEEFVSFANQLQALGLKLREVPGDGNCLFRALGDQLEGHSRNHLKHRQETVDYMIKQREDFEPFVEDDIPFEKHVASLAKPGTFAGNDAIVAFARNHQLNVVIHQLNAPLWQIRGTEKSSVRELHIAYRYGEHYDSVRRINDNSEAPAHLQTDFQMLHQDESNKREKIKTKGMDSEDDLRDEVEDAVQKVCNATGCSDFNLIVQNLEAENYNIESAIIAVLRMNQGKRNNAEENLEPSGRVLKQCGPLWEEGGSGARIFGNQGLNEGRTENNKAQASPSEENKANKNQLAKVTNKQRREQQWMEKKKRQEERHRHKALESRGSHRDNNRSEAEANTQVTLVKTFAALNI

SEQ ID NO: 80 - protein, 843 aa, Homo sapiens
MTLDMDAVLSDFVRSTGAEPGLARDLLEGKNWDVNAALSDFEQLRQVHAGNLPPSFSEGSGGSRTPEKGFSDREPTRPPRPILQRQDDIVQEKRLSRGISHASSSIVSLARSHVSSNGGGGGSNEHPLEMPICAFQLPDLTVYNEDFRSFIERDLIEQSMLVALEQAGRLNWWVSVDPTSQRLLPLATTGDGNCLLHAASLGMWGFHDRDLMLRKALYALMEKGVEKEALKRRWRWQQTQQNKESGLVYTEDEWQKEWNELIKLASSEPRMHLGTNGANCGGVESSEEPVYESLEEFHVFVLAHVLRRPIVVVADTMLRDSGGEAFAPIPFGGIYLPLEVPASQCHRSPLVLAYDQAHFSALVSMEQKENTKEQAVIPLTDSEYKLLPLHFAVDPGKGWEWGKDDSDNVRLASVILSLEVKLHLLHSYMNVKWIPLSSDAQAPLAQPESPTASAGDEPRSTPESGDSDKESVGSSSTSNEGGRRKEKSKRDREKDKKRADSVANKLGSFGKTLGSKLKKNMGGLMHSKGSKPGGVGTGLGGSSGTETLEKKKKNSLKSWKGGKEEAAGDGPVSEKPPAESVGNGGSKYSQEVMQSLSILRTAMQGEGKFIFVGTLKMGHRHQYQEEMIQRYLSDAEERFLAEQKQKEAERKIMNGGIGGGPPPAKKPEPDAREEQPTGPPAESRAMAFSTGYPGDFTIPRPSGGGVHCQEPRRQLAGGPCVGGLPPYATFPRQCPPGRPYPHQDSIPSLEPGSHSKDGLHRGALLPPPYRVADSYSNGYREPPEPDGWAGGLRGLPPTQTKCKQPNCSFYGHPETNNFCSCCYREELRRREREPDGELLVHRF

SEQ ID NO: 81 - protein, 571 aa, Homo sapiens
MTILPKKKPPPPDADPANEPPPPGPMPPAPRRGGGVGVGGGGTGVGGGDRDRDSGVVGARPRASPPPQGPLPGPPGALHRWALAVPPGAVAGPRPQQASPPPCGGPGGPGGGPGDALGAAAAGVGAAGVVVGVGGAVGVGGCCSGPGHSKRRRQAPGVGAVGGGSPEREEVGAGYNSEDEYEAAAARIEAMDPATVEQQEHWFEKALRDKKGFIIKQMKEDGACLFRAVADQVYGDQDMHEVVRKHCMDYLMKNADYFSNYVTEDFTTYINRKRKNNCHGNHIEMQAMAEMYNRPVEVYQYSTGTSAVEPINTFHGIHQNEDEPIRVSYHRNIHYNSVVNPNKATIGVGLGLPSFKPGFAEQSLMKNAIKTSEESWIEQQMLEDKKRATDWEATNEAIEEQVARESYLQWLRDQEKQARQVRGPSQPRKASATCSSATAAASSGLEEWTSRSPRQRSSASSPEHPELHAELGMKPPSPGTVLALAKPPSPCAPGTSSQFSAGADRATSPLVSLYPALECRALIQQMSPSAFGLNDWDDDEILASVLAVSQQEYLDSMKKNKVHRDPPPDKS

SEQ ID NO: 82 - protein, 790 aa, Homo sapiens
MAEQVLPQALYLSNMRKAVKIRERTPEDIFKPTNGIIHHFKTMHRYTLEMFRTCQFCPQFREIIHKALIDRNIQATLESQKKLNWCREVRKLVALKTNGDGNCLMHATSQYMWGVQDTDLVLRKALFSTLKETDTRNFKFRWQLESLKSQEFVETGLCYDTRNWNDEWDNLIKMASTDTPMARSGLQYNSLEEIHIFVLCNILRRPIIVISDKMLRSLESGSNFAPLKVGGIYLPLHWPAQECYRYPIVLGYDSHHFVPLVTLKDSGPEIRAVPLVNRDRGRFEDLKVHFLTDPENEMKEKLLKEYLMVIEIPVQGWDHGTTHLINAAKLDEANLPKEINLVDDYFELVQHEYKKWQENSEQGRREGHAQNPMEPSVPQLSLMDVKCETPNCPFFMSVNTQPLCHECSERRQKNQNKLPKLNSKPGPEGLPGMALGASRGEAYEPLAWNPEESTGGPHSAPPTAPSPFLFSETTAMKCRSPGCPFTLNVQHNGFCERCHNARQLHASHAPDHTRHLDPGKCQACLQDVTRTFNGICSTCFKRTTAEASSSLSTSLPPSCHQRSKSDPSRLVRSPSPHSCHRAGNDAPAGCLSQAARTPGDRTGTSKCRKAGCVYFGTPENKGFCTLCFIEYRENKHFAAASGKVSPTASRFQNTIPCLGRECGTLGSTMFEGYCQKCFIEAQNQRFHEAKRTEEQLRSSQRRDVPRTTQSTSRPKCARASCKNILACRSEELCMECQHPNQRMGPGAHRGEPAPEDPPKQRCRAPACDHFGNAKCNGYCNECFQFKQMYG

SEQ ID NO: 83 - protein, 708 aa, Homo sapiens
MSERGIKWACEYCTYENWPSAIKCTMCRAQRPSGTIITEDPFKSGSSDVGRDWDPSSTEGGSSPLICPDSSARPRVKSSYSMENANKWSCHMCTYLNWPRAIRCTQCLSQRRTRSPTESPQSSGSGSRPVAFSVDPCEEYNDRNKLNTRTQHWTCSVCTYENWAKAKRCVVCDHPRPNNIEAIELAETEEASSIINEQDRARWRGSCSSGNSQRRSPPATKRDSEVKMDFQRIELAGAVGSKEELEVDFKKLKQIKNRMKKTDWLFLNACVGVVEGDLAAIEAYKSSGGDIARQLTADEVRLLNRPSAFDVGYTLVHLAIRFQRQDMLAILLTEVSQQAAKCIPAMVCPELTEQIRREIAASLHQRKGDFACYFLTDLVTFTLPADIEDLPPTVQEKLFDEVLDRDVQKELEEESPIINWSLELATRLDSRLYALWNRTAGDCLLDSVLQATWGIYDKDSVLRKALHDSLHDCSHWFYTRWKDWESWYSQSFGLHFSLREEQWQEDWAFILSLASQPGASLEQTHIFVLAHILRRPIIVYGVKYYKSFRGETLGYTRFQGVYLPLLWEQSFCWKSPIALGYTRGHFSALVAMENDGYGNRGAGANLNTDDDVTITFLPLVDSERKLLHVHFLSAQELGNEEQQEKLLREWLDCCVTEGGVLVAMQKSSRRRNHPLVTQMVEKWLDRYRQIRPCTSLSDGEEDEDDEDE

SEQ ID NO: 84 - protein, 1222 aa, Homo sapiens
MSQPPPPPPPLPPPPPPPEAPQTPSSLASAAASGGLLKRRDRRILSGSCPDPKCQARLFFPASGSVSIECTECGQRHEQQQLLGVEEVTDPDVVLHNLLRNALLGVTGAPKKNTELVKVMGLSNYHCKLLSPILARYGMDKQTGRAKLLRDMNQGELFDCALLGDRAFLIEPEHVNTVGYGKDRSGSLLYLHDTLEDIKRANKSQECLIPVHVDGDGHCLVHAVSRALVGRELFWHALRENLKQHFQQHLARYQALFHDFIDAAEWEDIINECDPLFVPPEGVPLGLRNIHIFGLANVLHRPIILLDSLSGMRSSGDYSATFLPGLIPAEKCTGKDGHLNKPICIAWSSSGRNHYIPLVGIKGAALPKLPMNLLPKAWGVPQDLIKKYIKLEEDGGCVIGGDRSLQDKYLLRLVAAMEEVFMDKHGIHPSLVADVHQYFYRRTGVIGVQPEEVTAAAKKAVMDNRLHKCLLCGALSELHVPPEWLAPGGKLYNLAKSTHGQLRTDKNYSFPLNNLVCSYDSVKDVLVPDYGMSNLTACNWCHGTSVRKVRGDGSIVYLDGDRTNSRSTGGKCGCGFKHFWDGKEYDNLPEAFPITLEWGGRVVRETVYWFQYESDSSLNSNVYDVAMKLVTKHFPGEFGSEILVQKVVHTILHQTAKKNPDDYTPVNIDGAHAQRVGDVQGQESESQLPTKIILTGQKTKTLHKEELNMSKTERTIQQNITEQASVMQKRKTEKLKQEQKGQPRTVSPSTIRDGPSSAPATPTKAPYSPTTSKEKKIRITTNDGRQSMVTLKSSTTFFELQESIAREFNIPPYLQCIRYGFPPKELMPPQAGMEKEPVPLQHGDRITIEILKSKAEGGQSAAAHSAHTVKQEDIAVTGKLSSKELQEQAEKEMYSLCLLATLMGEDVWSYAKGLPHMFQQGGVFYSIMKKTMGMADGKHCTFPHLPGKTFVYNASEDRLELCVDAAGHFPIGPDVEDLVKEAVSQVRAEATTRSRESSPSHGLLKLGSGGVVKKKSEQLHNVTAFQGKGHSLGTASGNPHLDPRARETSVVRKHNTGTDFSNSSTKTEPSVFTASSSNSELIRIAPGVVTMRDGRQLDPDLVEAQRKKLQEMVSSIQASMDRHLRDQSTEQSPSDLPQRKTEVVSSSAKSGSLQTGLPESFPLTGGTENLNTETTDGCVADALGAAFATRSKAQRGNSVEELEEMDSQDAEMTNTTEPMDHS

SEQ ID NO: 85 - protein, 230 aa, Homo sapiens
MEGQRWLPLEANPEVTNQFLKQLGLHPNWQFVDVYGMDPELLSMVPRPVCAVLLLFPITEKYEVFRTEEEEKIKSQGQDVTSSVYFMKQTISNACGTIGLIHAIANNKDKMHFESGSTLKKFLEESVSMSPEERARYLENYDAIRVTHETSAHEGQTEAPSIDEKVDLHFIALVHVDGHLYELDGRKPFPINHGETSDETLLEDAIEVCKKFMERDPDELRFNAIALSAA

SEQ ID NO: 86 - protein, 223 aa, Homo sapiens [sequence omitted]

SEQ ID NO: 87 - protein, 329 aa, Homo sapiens
MTGNAGEWCLMESDPGVFTELIKGFGCRGAQVEEIWSLEPENFEKLKPVHGLIFLFKWQPGEEPAGSVVQDSRLDTIFFAKQVINNACATQAIVSVLLNCTHQDVHLGETLSEFKEFSQSFDAAMKGLALSNSDVIRQVHNSFARQQMFEFDTKTSAKEEDAFHFVSYVPVNGRLYELDGLREGPIDLGACNQDDWISAVRPVIEKRIQKYSEGEIRFNLMAIVSDRKMIYEQKIAELQRQLAEEEPMDTDQGNSMLSAIQSEVAKNQMLIEEEVQKLKRYKIENIRRKHNYLPFIMELLKTLAEHQQLIPLVEKAKEKQNAKKAQETK

SEQ ID NO: 88 - protein, 361 aa, Homo sapiens
MESIFHEKQEGSLCAQHCLNNLLQGEYFSPVELSSIAHQLDEEERMRMAEGGVTSEDYRTFLQQPSGNMDDSGFFSIQVISNALKVWGLELILFNSPEYQRLRIDPINERSFICNYKEHWFTVRKLGKQWFNLNSLLTGPELISDTYLALFLAQLQQEGYSIFVVKGDLPDCEADQLLQMIRVQQMHRPKLIGEELAQLKEQRVHKTDLERVLEANDGSGMLDEDEEDLQRALALSRQEIDMEDEEADLRRAIQLSMQGSSRNISQDMTQTSGTNLTSEELRKRREAYFEKQQQKQQQQQQQQQQGDLSGQSSHPCERPATSSGALGSDLGDAMSEEDMLQAAVTMSLETVRNDLKTEGKK

SEQ ID NO: 89 - protein, 188 aa, Homo sapiens
MSQAPGAQPSPPTVYHERQRLELCAVHALNNVLQQQLFSQEAADEICKRLAPDSRLNPHRSLLGTGNYDVNVIMAALQGLGLAAVWWDRRRPLSQLALPQVLGLILNLPSPVSLGLLSLPLRRRHWVALRQVDGVYYNLDSKLRAPEALGDEDGVRAFLAAALAQGLCEVLLVVTKEVEEKGSWLRTD

SEQ ID NO: 90 - protein, 202 aa, Homo sapiens
MSCVPWKGDKAKSESLELPQAAPPQIYHEKQRRELCALHALNNVFQDSNAFTRDTLQEIFQRLSPNTMVTPHKKSMLGNGNYDVNVIMAALQTKGYEAVWWDKRRDVGVIALTNVMGFIMNLPSSLCWGPLKLPLKRQHWICVREVGGAYYNLDSKLKMPEWIGGESELRKFLKHHLRGKNCELLLVVPEEVEAHQSWRTDV

SEQ ID NO: 91 - protein, 355 aa, Homo sapiens
MDFIFHEKQEGFLCAQHCLNNLLQGEYFSPVELASIAHQLDEEERMRMAEGGVTSEEYLAFLQQPSENMDDTGFFSIQVISNALKFWGLEIIHFNNPEYQKLGIDPINERSFICNYKQHWFTIRKFGKHWFNLNSLLAGPELISDTCLANFLARLQQQAYSVFVVKGDLPDCEADQLLQIISVEEMDTPKLNGKKLVKQKEHRVYKTVLEKVSEESDESGTSDQDEEDFQRALELSRQETNREDEHLRSTIELSMQGSSGNTSQDLPKTSCVTPASEQPKKIKEDYFEKHQQEQKQQQQQSDLPGHSSYLHERPTTSSRAIESDLSDDISEGTVQAAVDTILEIMRKNLKIKGEK

SEQ ID NO: 92 - protein, 445 aa, Homo sapiens
MSELTKELMELVWGTKSSPGLSDTIFCRWTQGFVFSESEGSALEQFEGGPCAVIAPVQAFLLKKLLFSSEKSSWRDCSEEEQKELLCHTLCDILESACCDHSGSYCLVSWLRGKTTEETASISGSPAESSCQVEHSSALAVEELGFERFHALIQKRSFRSLPELKDAVLDQYSMWGNKFGVLLFLYSVLLTKGIENIKNEIEDASEPLIDPVYGHGSQSLINLLLTGHAVSNVWDGDRECSGMKLLGIHEQAAVGFLTLMEALRYCKVGSYLKSPKFPIWIVGSETHLTVFFAKDMALVAPEAPSEQARRVFQTYDPEDNGFIPDSLLEDVMKALDLVSDPEYINLMKNKLDPEGLGIILLGPFLQEFFPDQGSSGPESFTVYHYNGLKQSNYNEKVMYVEGTAVVMGFEDPMLQTDDTPIKRCLQTKWPYIELLWTTDRSPSLN

SEQ ID NO: 93 - protein, 469 aa, Homo sapiens
MEYHQPEDPAPGKAGTAEAVIPENHEVLAGPDEHPQDTDARDADGEAREREPADQALLPSQCGDNLESPLPEASSAPPGPTLGTLPEVETIRACSMPQELPQSPRTRQPEPDFYCVKWIPWKGEQTPIITQSTNGPCPLLAIMNILFLQWKVKLPPQKEVITSDELMAHLGNCLLSIKPQEKSEGLQLNFQQNVDDAMTVLPKLATGLDVNVRFTGVSDFEYTPECSVFDLLGIPLYHGWLVDPQSPEAVRAVGKLSYNQLVERIITCKHSSDTNLVTEGLIAEQFLETTAAQLTYHGLCELTAAAKEGELSVFFRNNHFSTMTKHKSHLYLLVTDQGFLQEEQVVWESLHNVDGDSCFCDSDFHLSHSLGKGPGAEGGSGSPETQLQVDQDYLIALSLQQQQPRGPLGLTDLELAQQLQQEEYQQQQAAQPVRMRTRVLSLQGRGATSGRPAGERRQRPKHESDCILL

SEQ ID NO: 94 - protein, 621 aa, Homo sapiens
MESSPESLQPLEHGVAAGPASGTGSSQEGLQETRLAAGDGPGVWAAETSGGNGLGAAAARRSLPDSASPAGSPEVPGPCSSSAGLDLKDSGLESPAAAEAPLRGQYKVTASPETAVAGVGHELGTAGDAGARPDLAGTCQAELTAAGSEEPSSAGGLSSSCSDPSPPGESPSLDSLESFSNLHSFPSSCEFNSEEGAENRVPEEEEGAAVLPGAVPLCKEEEGEETAQVLAASKERFPGQSVYHIKWIQWKEENTPIITQNENGPCPLLAILNVLLLAWKVKLPPMMEIITAEQLMEYLGDYMLDAKPKEISEIQRLNYEQNMSDAMAILHKLQTGLDVNVRFTGVRVFEYTPECIVFDLLDIPLYHGWLVDPQIDDIVKAVGNCSYNQLVEKIISCKQSDNSELVSEGFVAEQFLNNTATQLTYHGLCELTSTVQEGELCVFFRNNHFSTMTKYKGQLYLLVTDQGFLTEEKVVWESLHNVDGDGNFCDSEFHLRPPSDPETVYKGQQDQIDQDYLMALSLQQEQQSQEINWEQIPEGISDLELAKKLQEEEDRRASQYYQEQEQAAAAAAAASTQAQQGQPAQASPSSGRQSGNSERKRKEPREKDKEKEKEKNSCVIL

SEQ ID NO: 95 - protein, 757 aa, Homo sapiens
MDSLFVEEVAASLVREFLSRKGLKKTCVTMDQERPRSDLSINNRNDLRKVLHLEFLYKENKAKENPLKTSLELITRYFLDHFGNTANNFTQDTPIPALSVPKKNNKVPSRCSETTLVNIYDLSDEDAGWRTSLSETSKARHDNLDGDVLGNFVSSKRPPHKSKPMQTVPGETPVLTSAWEKIDKLHSEPSLDVKRMGENSRPKSGLIVRGMMSGPIASSPQDSFHRHYLRRSSPSSSSTQPQEESRKVPELFVCTQQDILASSNSSPSRTSLGQLSELTVERQKTTASSPPHLPSKRLPPWDRARPRDPSEDTPAVDGSTDTDRMPLKLYLPGGNSRMTQERLERAFKRQGSQPAPVRKNQLLPSDKVDGELGALRLEDVEDELIREEVILSPVPSVLKLQTASKPIDLSVAKEIKTLLFGSSFCCFNEEWKLQSFSFSNTASLKYGIVQNKGGPCGVLAAVQGCVLQKLLFEGDSKADCAQGLQPSDAHRTRCLVLALADIVWRAGGRERAVVALASRTQQFSPTGKYKADGVLETLTLHSLTCYEDLVTFLQQSIHQFEVGPYGCILLTLSAILSRSTELIRQDFDVPTSHLIGAHGYCTQELVNLLLTGKAVSNVFNDVVELDSGDGNITLLRGIAARSDIGFLSLFEHYNMCQVGCFLKTPRFPIWVVCSESHFSILFSLQPGLLRDWRTERLFDLYYYDGLANQQEQIRLTIDTTQTISEDTDNDLVPPLELCIRTKWKGASVNWNGSDPIL

SEQ ID NO: 96 - protein, 424 aa, Homo sapiens
MSDHGDVSLPPEDRVRALSQLGSAVEVNEDIPPRRYFRSGVEIIRMASIYSEEGNIEHAFILYNKYITLFIEKLPKHRDYKSAVIPEKKDTVKKLKEIAFPKAEELKAELLKRYTKEYTEYNEEKKKEAEELARNMAIQQELEKEKQRVAQQKQQQLEQEQFHAFEEMIRNQELEKERLKIVQEFGKVDPGLGGPLVPDLEKPSLDVFPTLTVSSIQPSDCHTTVRPAKPPVVDRSLKPGALSNSESIPTIDGLRHVVVPGRLCPQFLQLASANTARGVETCGILCGKLMRNEFTITHVLIPKQSAGSDYCNTENEEELFLIQDQQGLITLGWIHTHPTQTAFLSSVDLHTHCSYQMMLPESVAIVCSPKFQETGFFKLTDHGLEEISSCRQKGFHPHSKDPPLFCSCSHVTVVDRAVTITDLR

SEQ ID NO: 97 - protein, 471 aa, Homo sapiens
MAAPEPLSPAGGAGEEAPEEDEDEAEAEDPERPNAGAGGGRSGGGGSSVSGGGGGGGAGAGGCGGPGGALTRRAVTLRVLLKDALLEPGAGVLSIYYLGKKFLGDLQPDGRIMWQETGQTFNSPSAWATHCKKLVNPAKKSGCGWASVKYKGQKLDKYKATWLRLHQLHTPATAADESPASEGEEEELLMEEEEEDVLAGVSAEDKSRRPLGKSPSEPAHPEATTPGKRVDSKIRVPVRYCMLGSRDLARNPHTLVEVTSFAAINKFQPFNVAVSSNVLFLLDFHSHLTRSEVVGYLGGRWDVNSQMLTVLRAFPCRSRLGDAETAAAIEEEIYQSLFLRGLSLVGWYHSHPHSPALPSLQDIDAQMDYQLRLQGSSNGFQPCLALLCSPYYSGNPGPESKISPFWVMPPPEMLLVEFYKGSPDLVRLQEPWSQEHTYLDKLKISLASRTPKDQSLCHVLEQVCGVLKQGS

SEQ ID NO: 98 - protein, 208 aa, Homo sapiens
MGEVEISALAYVKMCLHAARYPHAAVNGLFLAPAPRSGECLCLTDCVPLFHSHLALSVMLEVALNQVDVWGAQAGLVVAGYYHANAAVNDQSPGPLALKIAGRIAEFFPDAVLIMLDNQKLVPQPRVPPVIVLENQGLRWVPKDKNLVMWRDWEESRQMVGALLEDRAHQHLVDFDCHLDDIRQDWTNQRLNTQITQWVGPTNGNGNA

SEQ ID NO: 99 - protein, 310 aa, Homo sapiens
MDRLLRLGGGMPGLGQGPPTDAPAVDTAEQVYISSLALLKMLKHGRAGVPMEVMGLMLGEFVDDYTVRVIDVFAMPQSGTGVSVEAVDPVFQAKMLDMLKQTGRPEMVVGWYHSHPGFGCWLSGVDINTQQSFEALSERAVAVVVDPIQSVKGKVVIDAFRLINANMMVLGHEPRQTTSNLGHLNKPSIQALIHGLNRHYYSITINYRKNELEQKMLLNLHKKSWMEGLTLQDYSEHCKHNESVVKEMLELAKNYNKAVEEEDKMTPEQLAIKNVGKQDPKRHLEEHVDVLMTSNIVQCLAAMLDTVVFK

SEQ ID NO: 100 - protein, 828 aa, Homo sapiens
MAAEEADVDIEGDVVAAAGAQPGSGENTASVLQKDHYLDSSWRTENGLIPWTLDNTISEENRAVIEKMLLEEEYYLSKKSQPEKVWLDQKEDDKKYMKSLQKTAKIMVHSPTKPASYSVKWTIEEKELFEQGLAKFGRRWTKISKLIGSRTVLQVKSYARQYFKNKVKCGLDKETPNQKTGHNLQVKNEDKGTKAWTPSCLRGRADPNLNAVKIEKLSDDEEVDITDEVDELSSQTPQKNSSSDLLLDFPNSKMHETNQGEFITSDSQEALFSKSSRGCLQNEKQDETLSSSEITLWTEKQSNGDKKSIELNDQKFNELIKNCNKHDGRGIIVDARQLPSPEPCEIQKNLNDNEMLFHSCQMVEESHEEEELKPPEQEIEIDRNIIQEEEKQAIPEFFEGRQAKTPERYLKIRNYILDQWEICKPKYLNKTSVRPGLKNCGDVNCIGRIHTYLELIGAINFGCEQAVYNRPQTVDKVRIRDRKDAVEAYQLAQRLQSMRTRRRRVRDPWGNWCDAKDLEGQTFEHLSAEELAKRREEEKGRPVKSLKVPRPTKSSFDPFQLIPCNFFSEEKQEPFQVKVASEALLIMDLHAHVSMAEVIGLLGGRYSEVDKVVEVCAAEPCNSLSTGLQCEMDPVSQTQASETLAVRGFSVIGWYHSHPAFDPNPSLRDIDTQAKYQSYFSRGGAKFIGMIVSPYNRNNPLPYSQITCLVISEEISPDGSYRLPYKFEVQQMLEEPQWGLVFEKTRWIIEKYRLSHSSVPMDKIFRRDSDLTCLQKLLECMRKTLSKVTNCFMAEEFLTEIENLFLSNYKSNQENGVTEENCTKELLM

SEQ ID NO: 101 - protein, 415 aa, Homo sapiens
MAASISGYTFSAVCFHSANSNADHEGFLLGEVRQEETFSISDSQISNTEFLQVIEIHNHQPCSKLFSFYDYASKVNEESLDRILKDRRKKVIGWYRFRRNTQQQMSYREQVLHKQLTRILGVPDLVFLLFSFISTANNSTHALEYVLFRPNRRYNQRISLAIPNLGNTSQQEYKVSSVPNTSQSYAKVIKEHGTDFFDKDGVMKDIRAIYQVYNALQEKVQAVCADVEKSERVVESCQAEVNKLRRQITQRKNEKEQERRLQQAVLSRQMPSESLDPAFSPRMPSSGFAAEGRSTLGDAEASDPPPPYSDFHPNNQESTLSHSRMERSVFMPRPQAVGSSNYASTSAGLKYPGSGADLPPPQRAAGDSGEDSDDSDYENLIDPTEPSNSEYSHSKDSRPMAHPDEDPRNTQTSQI

SEQ ID NO: 102 - protein, 2335 aa, Homo sapiens
MAGVFPYRGPGNPVPGPLAPLPDYMSEEKLQEKARKWQQLQAKRYAEKRKFGFVDAQKEDMPPEHVRKIIRDHGDMTNRKFRHDKRVYLGALKYMPHAVLKLLENMPMPWEQIRDVPVLYHITGAISFVNEIPWVIEPVYISQWGSMWIMMRREKRDRRHFKRMRFPPFDDEEPPLDYADNILDVEPLEAIQLELDPEEDAPVLDWFYDHQPLRDSRKYVNGSTYQRWQFTLPMMSTLYRLANQLLTDLVDDNYFYLFDLKAFFTSKALNMAIPGGPKFEPLVRDINLQDEDWNEFNDINKIIIRQPIRTEYKIAFPYLYNNLPHHVHLTWYHTPNVVFIKTEDPDLPAFYFDPLINPISHRHSVKSQEPLPDDDEEFELPEFVEPFLKDTPLYTDNTANGIALLWAPRPFNLRSGRTRRALDIPLVKNWYREHCPAGQPVKVRVSYQKLLKYYVLNALKHRPPKAQKKRYLFRSFKATKFFQSTKLDWVEVGLQVCRQGYNMLNLLIHRKNLNYLHLDYNFNLKPVKTLTTKERKKSRFGNAFHLCREVLRLTKLVVDSHVQYRLGNVDAFQLADGLQYIFAHVGQLTGMYRYKYKLMRQIRMCKDLKHLIYYRFNTGPVGKGPGCGFWAAGWRVWLFFMRGITPLLERWLGNLLARQFEGRHSKGVAKTVTKQRVESHFDLELRAAVMHDILDMMPEGIKQNKARTILQHLSEAWRCWKANIPWKVPGLPTPIENMILRYVKAKADWWTNTAHYNRERIRRGATVDKTVCKKNLGRLTRLYLKAEQERQHNYLKDGPYITAEEAVAVYTTTVHWLESRRFSPIPFPPLSYKHDTKLLILALERLKEAYSVKSRLNQSQREELGLIEQAYDNPHEALSRIKRHLLTQRAFKEVGIEFMDLYSHLVPVYDVEPLEKITDAYLDQYLWYEADKRRLFPPWIKPADTEPPPLLVYKWCQGINNLQDVWETSEGECNVMLESRFEKMYEKIDLTLLNRLLRLIVDHNIADYMTAKNNVVINYKDMNHTNSYGIIRGLQFASFIVQYYGLVMDLLVLGLHRASEMAGPPQMPNDFLSFQDIATEAAHPIRLFCRYIDRIHIFFRFTADEARDLIQRYLTEHPDPNNENIVGYNNKKCWPRDARMRLMKHDVNLGRAVFWDIKNRLPRSVTTVQWENSFVSVYSKDNPNLLFNMCGFECRILPKCRTSYEEFTHKDGVWNLQNEVTKERTAQCFLRVDDESMQRFHNRVRQILMASGSTTFTKIVNKWNTALIGLMTYFREAVVNTQELLDLLVKCENKIQTRIKIGLNSKMPSRFPPVVFYTPKELGGLGMLSMGHVLIPQSDLRWSKQTDVGITHFRSGMSHEEDQLIPNLYRYIQPWESEFIDSQRVWAEYALKRQEAIAQNRRLTLEDLEDSWDRGIPRINTLFQKDRHTLAYDKGWRVRTDFKQYQVLKQNPFWWTHQRHDGKLWNLNNYRTDMIQALGGVEGILEHTLFKGTYFPTWEGLFWEKASGFEESMKWKKLTNAQRSGLNQIPNRRFTLWWSPTINRANVYVGFQVQLDLTGIFMHGKIPTLKISLIQIFRAHLWQKIHESIVMDLCQVFDQELDALEIETVQKETIHPRKSYKMNSSCADILLFASYKWNVSRPSLLADSKDVMDSTTTQKYWIDIQLRWGDYDSHDIERYARAKFLDYTTDNMSIYPSPTGVLIAIDLAYNLHSAYGNWFPGSKPLIQQAMAKIMKANPALYVLRERIRKGLQLYSSEPTEPYLSSQNYGELFSNQIIWFVDDTNVYRVTIHKTFEGNLTTKPINGAIFIFNPRTGQLFLKIIHTSVWAGQKRLGQLAKWKTAEEVAALIRSLPVEEQPKQIIVTRKGMLDPLEVHLLDFPNIVIKGSELQLPFQACLKVEKFGDLILKATEPQMVLFNLYDDWLKTISSYTAFSRLILILRALHVNNDRAKVILKPDKTTITEPHHIWPTLTDEEWIKVEVQLKDLILADYGKKNNVNVASLTQSEIRDIILGMEISAPSQQRQQIAEIEKQTKEQSQLTATQTRTVNKHGDEIITSTTSNYETQTFSSKTEWRVRAISAANLHLRTNHIYVSSDDIKETGYTYILPKNVLKKFICISDLRAQIAGYLYGVSPPDNPQVKEIRCIVMVPQWGTHQTVHLPGQLPQHEYLKEMEPLGWIHTQPNESPQLSPQDVTTHAKIMADNPSWDGEKTIIITCSFTPGSCTLTAYKLTPSGYEWGRQNTDKGNNPKGYLPSHYERVQMLLSDRFLGFFMVPAQSSWNYNFMGVRHDPNMKYELQLANPKEFYHEVHRPSHFLNFALLQEGEVYSADREDLYA

SEQ ID NO: 103 - protein, 608 aa, Homo sapiens
MAESIIIRVQSPDGVKRITATKRETAATFLKKVAKEFGFQNNGFSVYINRNKTGEITASSNKSLNLLKIKHGDLLFLFPSSLAGPSSEMETSVPPGFKVFGAPNVVEDEIDQYLSKQDGKIYRSRDPQLCRHGPLGKCVHCVPLEPFDEDYLNHLEPPVKHMSFHAYIRKLTGGADKGKFVALENISCKIKSGCEGHLPWPNGICTKCQPSAITLNRQKYRHVDNIMFENHTVADRFLDFWRKTGNQHFGYLYGRYTEHKDIPLGIRAEVAAIYEPPQIGTQNSLELLEDPKAEVVDEIAAKLGLRKVGWIFTDLVSEDTRKGTVRYSRNKDTYFLSSEECITAGDFQNKHPNMCRLSPDGHFGSKFVTAVATGGPDNQVHFEGYQVSNQCMALVRDECLLPCKDAPELGYAKESSSEQYVPDVFYKDVDKFGNEITQLARPLPVEYLIIDITTTFPKDPVYTFSISQNPFPIENRDVLGETQDFHSLATYLSQNTSSVFLDTISDFHLLLFLVTNEVMPLQDSISLLLEAVRTRNEELAQTWKRSEQWATIEQLCSTVGGQLPGLHEYGAVGGSTHTATAAMWACQHCTFMNQPGTGHCEMCSLPRT

SEQ ID NO: 104 - protein, 210 aa, Homo sapiens
MPGVKLTTQAYCKMVLHGAKYPHCAVNGLLVAEKQKPRKEHLPLGGPGAHHTLFVDCIPLFHGTLALAPMLEVALTLIDSWCKDHSYVIAGYYQANERVKDASPNQVAEKVASRIAEGFSDTALIMVDNTKFTMDCVAPTIHVYEHHENRWRCRDPHHDYCEDWPEAQRISASLLDSRSYETLVDFDNHLDDIRNDWTNPEINKAVLHLC

SEQ ID NO: 105 - protein, 409 aa, Homo sapiens
MEGESTSAVLSGFVLGALAFQHLNTDSDTEGFLLGEVKGEAKNSITDSQMDDVEVVYTIDIQKYIPCYQLFSFYNSSGEVNEQALKKILSNVKKNVVGWYKFRRHSDQIMTFRERLLHKNLQEHFSNQDLVFLLLTPSIITESCSTHRLEHSLYKPQKGLFHRVPLVVANLGMSEQLGYKTVSGSCMSTGFSRAVQTHSSKFFEEDGSLKEVHKINEMYASLQEELKSICKKVEDSEQAVDKLVKDVNRLKREIEKRRGAQIQAAREKNIQKDPQENIFLCQALRTFFPNSEFLHSCVMSLKNRHVSKSSCNYNHHLDVVDNLTLMVEHTDIPEASPASTPQIIKHKALDLDDRWQFKRSRLLDTQDKRSKADTGSSNQDKASKMSSPETDEEIEKMKGFGEYSRSPTF

SEQ ID NO: 106 - protein, 436 aa, Homo sapiens
MDQPFTVNSLKKLAAMPDHTDVSLSPEERVRALSKLGCNITISEDITPRRYFRSGVEMERMASVYLEEGNLENAFVLYNKFITLFVEKLPNHRDYQQCAVPEKQDIMKKLKEIAFPRTDELKNDLLKKYNVEYQEYLQSKNKYKAEILKKLEHQRLIEAERKRIAQMRQQQLESEQFLFFEDQLKKQELARGQMRSQQTSGLSEQIDGSALSCFSTHQNNSLLNVFADQPNKSDATNYASHSPPVNRALTPAATLSAVQNLVVEGLRCVVLPEDLCHKFLQLAESNTVRGIETCGILCGKLTHNEFTITHVIVPKQSAGPDYCDMENVEELFNVQDQHDLLTLGWIHTHPTQTAFLSSVDLHTHCSYQLMLPEAIAIVCSPKHKDTGIFRLTNAGMLEVSACKKKGFHPHTKEPRLFSICKHVLVKDIKIIVLDLR

SEQ ID NO: 107 - protein, 327 aa, Homo sapiens
MAAAAAAAAATNGTGGSSGMEVDAAVVPSVMACGVTGSVSVALHPLVILNISDHWIRMRSQEGRPVQVIGALIGKQEGRNIEVMNSFELLSHTVEEKIIIDKEYYYTKEEQFKQVFKELEFLGWYTTGGPPDPSDIHVHKQVCEIIESPLFLKLNPMTKHTDLPVSVFESVIDIINGEATMLFAELTYTLATEEAERIGVDHVARMTATGSGENSTVAEHLIAQHSAIKMLHSRVKLILEYVKASEAGEVPFNHEILREAYALCHCLPVLSTDKFKTDFYDQCNDVGLMAYLGTITKTCNTMNQFVNKFNVLYDRQGIGRRMRGLFF

SEQ ID NO: 108 - protein, 357 aa, Homo sapiens
MATPAVPVSAPPATPTPVPAAAPASVPAPTPAPAAAPVPAAAPASSSDPAAAAAATAAPGQTPASAQAPAQTPAPALPGPALPGPFPGGRVVRLHPVILASIVDSYERRNEGAARVIGTLLGTVDKHSVEVTNCFSVPHNESEDEVAVDMEFAKNMYELHKKVSPNELILGWYATGHDITEHSVLIHEYYSREAPNPIHLTVDTSLQNGRMSIKAYVSTLMGVPGRTMGVMFTPLTVKYAYYDTERIGVDLIMKTCFSPNRVIGLSSDLQQVGGASARIQDALSTVLQYAEDVLSGKVSADNTVGRFLMSLVNQVPKIVPDDFETMLNSNINDLLMVTYLANLTQSQIALNEKLVNL

SEQ ID NO: 109 - protein, 324 aa, Homo sapiens
MPELAVQKVVVHPLVLLSVVDHFNRIGKVGNQKRVVGVLLGSWQKKVLDVSNSFAVPFDEDDKDDSVWFLDHDYLENMYGMFKKVNARERIVGWYHTGPKLHKNDIAINELMKRYCPNSVLVIIDVKPKDLGLPTEAYISVEEVHDDGTPTSKTFEHVTSEIGAEEAEEVGVEHLLRDIKDTTVGTLSQRITNQVHGLKGLNSKLLDIRSYLEKVATGKLPINHQIIYQLQDVFNLLPDVSLQEFVKAFYLKTNDQMVVVYLASLIRSVVALHNLINNKIANRDAEKKEGQEKEESKKDRKEDKEKDKDKEKSDVKKEEKKEKK

SEQ ID NO: 110 - protein, 352 aa, Homo sapiens
MASRKEGTGSTATSSSSTAGAAGKGKGKGGSGDSAVKQVQIDGLVVLKIIKHYQEEGQGTEVVQGVLLGLVVEDRLEITNCFPFPQHTEDDADFDEVQYQMEMMRSLRHVNIDHLHVGWYQSTYYGSFVTRALLDSQFSYQHAIEESVVLIYDPIKTAQGSLSLKAYRLTPKLMEVCKEKDFSPEALKKANITFEYMFEEVPIVIKNSHLINVLMWELEKKSAVADKHELLSLASSNHLGKNLQLLMDRVDEMSQDIVKYNTYMRNTSKQQQQKHQYQQRRQQENMQRQSRGEPPLPEEDLSKLFKPPQPPARMDSLLIAGQINTYCQNIKEFTAQNLGKLFMAQALQEYNN

SEQ ID NO: 111 - protein, 334 aa, Homo sapiens
MAASGSGMAQKTWELANNMQEAQSIDEIYKYDKKQQQEILAAKPWTKDHHYFKYCKISALALLKMVMHARSGGNLEVMGLMLGKVDGETMIIMDSFALPVEGTETRVNAQAAAYEYMAAYIENAKQVGRLENAIGWYHSHPGYGCWLSGIDVSTQMLNQQFQEPFVAVVIDPTRTISAGKVNLGAFRTYPKGYKPPDEGPSEYQTIPLNKIEDFGVHCKQYYALEVSYFKSSLDRKLLELLWNKYWVNTLSSSSLLTNADYTTGQVFDLSEKLEQSEAQLGRGSFMLGLETHDRKSEDKLAKATRDSCKTTIEAIHGLMSQVIKDKLFNQINIS

SEQ ID NO: 112 - protein, 316 aa, Homo sapiens
MAVQVVQAVQAVHLESDAFLVCLNHALSTEKEEVMGLCIGELNDDTRSDSKFAYTGTEMRTVAEKVDAVRIVHIHSVIILRRSDKRKDRVEISPEQLSAASTEAERLAELTGRPMRVVGWYHSHPHITVWPSHVDVRTQAMYQMMDQGFVGLIFSCFIEDKNTKTGRVLYTCFQSIQAQKSSESLHGPRDFWSSSQHISIEGQKEEERYERIEIPIHIVPHVTIGKVCLESAVELPKILCQEEQDAYRRIHSLTHLDSVTKIHNGSVFTKNLCSQMSAVSGPLLQWLEDRLEQNQQHLQELQQEKEELMQELSSLE

SEQ ID NO: 113 - protein, 368 aa, Homo sapiens
SSFTIGLRGLINLGNTCFMNCIVQALTHTPILRDFFLSDRHRCEMPSPELCLVCEMSSLFRELYSGNPSPHVPYKLLHLVWIHARHLAGYRQQDAHEFLIAALDVLHRHCKGDDVGKAANNPNHCNCIIDQIFTGGLQSDVTCQACHGVSTTIDPCWDISLDLPGSCTSFWPMSPGRESSVNGESHIPGITTLTDCLRRFTRPEHLGSSAKIKCGSCQSYQESTKQLTMNKLPVVACFHFKRFEHSAKQRRKITTYISFPLELDMTPFMASSKESRMNGQLQLPTNSGNNENKYSLFAVVNHQGTLESGHYTSFIRHHKDQWFKCDDAVITKASIKDVLDSEGYLLFYHKQVLEHESEKVKEMNTQAY

SEQ ID NO: 114 - protein, 353 aa, Homo sapiens
NSFHNIDDPNCERRKKNSFVGLTNLGATCYVNTFLQVWFLNLELRQALYLCPSTCSDYMLGDGIQEEKDYEPQTICEHLQYLFALLQNSNRRYIDPSGFVKALGLDTGQQQDAQEFSKLFMSLLEDTLSKQKNPDVRNIVQQQFCGEYAYVTVCNQCGRESKLLSKFYELELNIQGHKQLTDCISEFLKEEKLEGDNRYFCENCQSKQNATRKIRLLSLPCTLNLQLMRFVFDRQTGHKKKLNTYIGFSEILDMEPYVEHKGGSYVYELSAVLIHRGVSAYSGHYIAHVKDPQSGEWYKFNDEDIEKMEGKKLQLGIEEDLAEPSKSQTRKPKCGKGTHCSRNAYMLVYRLQT

SEQ ID NO: 115 - protein, 359 aa, Homo sapiens
TAICATGLRNLGNTCFMNAILQSLSNIEQFCCYFKELPAVELRNGKTAGRRTYHTRSQGDNNVSLVEEFRKTLCALWQGSQTAFSPESLFYVVWKIMPNFRGYQQQDAHEFMRYLLDHLHLELQGGFNGVSRSAILQENSTLSASNKCCINGASTVVTAIFGGILQNEVNCLICGTESRKFDPFLDLSLDIPSQFRSKRSKNQENGPVCSLRDCLRSFTDLEELDETELYMCHKCKKKQKSTKKFWIQKLPKVLCLHLKRFHWTAYLRNKVDTYVEFPLRGLDMKCYLLEPENSGPESCLYDLAAVVVHHGSGVGSGHYTAYATHEGRWFHFNDSTVTLTDEETVVKAKAYILFYVEHQ

SEQ ID NO: 116 - protein, 300 aa, Homo sapiens
AVGAGLQNMGNTCYVNASLQCLTYTPPLANYMLSREHSQTCHRHKGCMLCTMQAHITRALHNPGHVIQPSQALAAGFHRGKQEDAHEFLMFTVDAMKKACLPGHKQVDHHSKDTTLIHQIFGGYWRSQIKCLHCHGISDTFDPYLDIALDIQAAQSVQQALEQLVKPEELNGENAYHCGVCLQRAPASKTLTLHTSAKVLILVLKRFSDVTGNKIAKNVQYPECLDMQPYMSQTNTGPLVYVLYAVLVHAGWSCHNGHYFSYVKAQEGQWYKMDDAEVTASSITSVLSQQAYVLFYIQKS

SEQ ID NO: 117 - protein, 708 aa, Homo sapiens
LPFVGLNNLGNTCYLNSILQVLYFCPGFKSGVKHLFNIISRKKEALKDEANQKDKGNCKEDSLASYELICSLQSLIISVEQLQASFLLNPEKYTDELATQPRRLLNTLRELNPMYEGYLQHDAQEVLQCILGNIQETCQLLKKEEVKNVAELPTKVEEIPHPKEEMNGINSIEMDSMRHSEDFKEKLPKGNGKRKSDTEFGNMKKKVKLSKEHQSLEENQRQTRSKRKATSDTLESPPKIIPKYISENESPRPSQKKSRVKINWLKSATKQPSILSKFCSLGKITTNQGVKGQSKENECDPEEDLGKCESDNTTNGCGLESPGNTVTPVNVNEVKPINKGEEQIGFELVEKLFQGQLVLRTRCLECESLTERREDFQDISVPVQEDELSKVEESSEISPEPKTEMKTLRWAISQFASVERIVGEDKYFCENCHHYTEAERSLLFDKMPEVITIHLKCFAASGLEFDCYGGGLSKINTPLLTPLKLSLEEWSTKPTNDSYGLFAVVMHSGITISSGHYTASVKVTDLNSLELDKGNFVVDQMCEIGKPEPLNEEEARGVVENYNDEEVSIRVGGNTQPSKVLNKKNVEAIGLLGGQKSKADYELYNKASNPDKVASTAFAENRNSETSDTTGTHESDRNKESSDQTGINISGFENKISYVVQSLKEYEGKWLLFDDSEVKVTEEKDFLNSLSPSTSPTSTPYLLFYKKL

SEQ ID NO: 118 - protein, 1164 aa, Homo sapiens
FTNLSGIRNQGGTCYLNSLLQTLHFTPEFREALFSLGPEELGLFEDKDKPDAKVRIIPLQLQRLFAQLLLLDQEAASTADLTDSFGWTSNEEMRQHDVQELNRILFSALETSLVGTSGHDLIYRLYHGTIVNQIVCKECKNVSERQEDFLDLTVAVKNVSGLEDALWNMYVEEEVFDCDNLYHCGTCDRLVKAAKSAKLRKLPPFLTVSLLRFNFDFVKCERYKETSCYTFPLRINLKPFCEQSELDDLEYIYDLFSVIIHKGGCYGGHYHVYIKDVDHLGNWQFQEEKSKPDVNLKDLQSEEEIDHPLMILKAILLEENNLIPVDQLGQKLLKKIGISWNKKYRKQHGPLRKFLQLHSQIFLLSSDESTVRLLKNSSLQAESDFQRNDQQIFKMLPPESPGLNNSISCPHWFDINDSKVQPIREKDIEQQFQGKESAYMLFYRKSQLQRPPEARANPRYGVPCHLLNEMDAANIELQTKRAECDSANNTFELHLHLGPQYHFFNGALHPVVSQTESVWDLTFDKRKTLGDLRQSIFQLLEFWEGDMVLSVAKLVPAGLHIYQSLGGDELTLCETEIADGEDIFVWNGVEVGGVHIQTGIDCEPLLLNVLHLDTSSDGEKCCQVIESPHVFPANAEVGTVLTALAIPAGVIFINSAGCPGGEGWTAIPKEDMRKTFREQGLRNGSSILIQDSHDDNSLLTKEEKWVTSMNEIDWLHVKNLCQLESEEKQVKISATVNTMVFDIRIKAIKELKLMKELADNSCLRPIDRNGKLLCPVPDSYTLKEAELKMGSSLGLCLGKAPSSSQLFLFFAMGSDVQPGTEMEIVVEETISVRDCLKLMLKKSGLQGDAWHLRKMDWCYEAGEPLCEEDATLKELLICSGDTLLLIEGQLPPLGFLKVPIWWYQLQGPSGHWESHQDQTNCTSSWGRVWRATSSQGASGNEPAQVSLLYLGDIEISEDATLAELKSQAMTLPPFLEFGVPSPAHLRAWTVERKRPGRLLRTDRQPLREYKLGRRIEICLEPLQKGENLGPQDVLLRTQVRIPGERTYAPALDLVWNAAQGGTAGSLRQRVADFYRLPVEKIEIAKYFPEKFEWLPISSWNQQITKRKKKKKQDYLQGAPYYLKDGDTIGVKNLLIDDDDDFSTIRDDTGKEKQKQRALGRRKSQ

SEQ ID NO: 119 - protein, 311 aa, Homo sapiens
TGYVGLKNQGATCYMNSLLQTLFFTNQLRKAVYMMPTEGDDSSKSVPLALQRVFYELQHSDKPVGTKKLTKSFGWETLDSFMQHDVQELCRVLLDNVENKMKGTCVEGTIPKLFRGKMVSYIQCKEVDYRSDRREDYYDIQLSIKGKKNIFESFVDYVAVEQLDGDNKYDAGEHGLQEAEKGVKFLTLPPVLHLQLMRFMYDPQTDQNIKINDRFEFPEQLPLDEFLQKTDPKDPANYILHAVLVHSGDNHGGHYVVYLNPKGDGKWCKFDDDVVSRCTKEEAIEHNYGGHDDDLSVRHCTNAYMLVYIRE

SEQ ID NO: 120 - protein, 344 aa, Homo sapiens
AVGAGLQNMGNTCYVNASLQCLTYTPPLANYMLSREHSQTCHRHKGCMLCTMQAHITRALHNPGHVIQPSQALAAGFHRGKQEDAHEFLMFTVDAMKKACLPGHKQVDHHSKDTTLIHQIFGGYWRSQIKCLHCHGISDTFDPYLDIALDIQAAQSVQQALEQLAKPEELNGENAYHCGVCLQRAPASKTLTLHTSAKVLILVLKRFSDVTGNKIAKNVQYPECLDMQPYMSQPNTGPLVYVLYAVLVHAGWSCHNGHYFSYVKAQEGQWYKMDDAEVTASSITSVLSQQAYVLFYIQKSEWERHSESVSRGREPRALGAEDTDRRATQGELKRDHPCLQAPEL

SEQ ID NO: 121 - protein, 344 aa, Homo sapiens
AVGAGLQNMGNTCYVNASLQCLTYTPPLANYMLSREHSQTCHRHKGCMLCTMQAHITRALHNPGHVIQPSQALAAGFHRGKQEDAHEFLMFTVDAMKKACLPGHKQVDHHSKDTTLIHQIFGGYWRSQIKCLHCHGISDTFDPYLDIALDIQAAQSVQQALEQLVKPEELNGENAYHCGVCLQRAPASKMLTLLTSAKVLILVLKRFSDVTGNKIAKNVQYPECLDMQPYMSQPNTGPLVYVLYAVLVHAGWSCHNGHYFSYVKAQEGQWYKMDDAEVTASSITSVLSQQAYVLFYIQKSEWERHSESVSRGREPRALGAEDTDRRATQGELKRDHPCLQAPEL

SEQ ID NO: 122 - protein, 344 aa, Homo sapiens
AVGAGLQNMGNTCYVNASLQCLTYKPPLANYMLFREHSQTCHRHKGCMLCTMQAHITRALHIPGHVIQPSQALAAGFHRGKQEDAHEFLMFTVDAMRKACLPGHKQVDRHSKDTTLIHQIFGGYWRSQIKCLHCHGISDTFDPYLDIALDIQAAQSVQQALEQLVKPEELNGENAYHCGVCLQRAPASKTLTLHNSAKVLILVLKRFPDVTGNKIAKNVQYPECLDMQPYMSQQNTGPLVYVLYAVLVHAGWSCHNGHYSSYVKAQEGQWYKMDDAEVTASSITSVLSQQAYVLFYIQKSEWERHSESVSRGREPRALGVEDTDRRATQGELKRDHPCLQAPEL

SEQ ID NO: 123 - protein, 307 aa, Homo sapiens
WGLVGLHNIGQTCCLNSLIQVFVMNVDFARILKRITVPRGADEQRRSVPFQMLLLLEKMQDSRQKAVWPLELAYCLQKYNVPLFVQHDAAQLYLKLWNLIKDQIADVHLVERLQALYMIRMKDSLICLDCAMESSRNSSMLTLRLSFFDVDSKPLKTLEDALHCFFQPRELSSKSKCFCENCGKKTRGKQVLKLTHLPQTLTIHLMRFSIRNSQTRKICHSLYFPQSLDFSQILPMKRESCDAEEQSGGQYELFAVIAHVGMADSGHYCVYIRNAVDGKWFCFNDSNICLVSWEDIQCTYGNPNYHW

SEQ ID NO: 124 - protein, 511 aa, Homo sapiens
SETGKTGLINLGNTCYMNSVIQALFMATDFRRQVLSLNLNGCNSLMKKLQHLFAFLAHTQREAYAPRIFFEASRPPWFTPRSQQDCSEYLRFLLDRLHEEEKILKVQASHKPSEILECSETSLQEVASKAAVLTETPRTSDGEKTLIEKMFGGKLRTHIRCLNCRSTSQKVEAFTDLSLAFCPSSSLENMSVQDPASSPSIQDGGLMQASVPGPSEEPVVYNPTTAAFICDSLVNEKTIGSPPNEFYCSENTSVPNESNKILVNKDVPQKPGGETTPSVTDLLNYFLAPEILTGDNQYYCENCASLQNAEKTMQITEEPEYLILTLLRFSYDQKYHVRRKILDNVSLPLVLELPVKRITSFSSLSESWSVDVDFTDLSENLAKKLKPSGTDEASCTKLVPYLLSSVVVHSGISSESGHYYSYARNITSTDSSYQMYHQSEALALASSQSHLLGRDSPSAVFEQDLENKEMSKEWFLFNDSRVTFTSFQSVQKITSRFPKDTAYVLLYKKQH

SEQ ID NO: 125 - protein, 616 aa, Homo sapiens
RPPGAQGLKNHGNTCFMNAVVQCLSNTDLLAEFLALGRYRAAPGRAEVTEQLAALVRALWTREYTPQLSAEFKNAVSKYGSQFQGNSQHDALEFLLWLLDRVHEDLEGSSRGPVSEKLPPEATKTSENCLSPSAQLPLGQSFVQSHFQAQYRSSLTCPHCLKQSNTFDPFLCVSLPIPLRQTRFLSVTLVFPSKSQRFLRVGLAVPILSTVAALRKMVAEEGGVPADEVILVELYPSGFQRSFFDEEDLNTIAEGDNVYAFQVPPSPSQGTLSAHPLGLSASPRLAAREGQRFSLSLHSESKVLILFCNLVGSGQQASRFGPPFLIREDRAVSWAQLQQSILSKVRHLMKSEAPVQNLGSLFSIRVVGLSVACSYLSPKDSRPLCHWAVDRVLHLRRPGGPPHVKLAVEWDSSVKERLFGSLQEERAQDADSVWQQQQAHQQHSCTLDECFQFYTKEEQLAQDDAWKCPHCQVLQQGMVKLSLWTLPDILIIHLKRFCQVGERRNKLSTLVKFPLSGLNMAPHVAQRSTSPEAGLGPWPSWKQPDCLPTSYPLDFLYDLYAVCNHHGNLQGGHYTAYCRNSLDGQWYSYDDSTVEPLREDEVNTRGAYILFYQKRN

SEQ ID NO: 126 - protein, 339 aa, Homo sapiens
SAQGLAGLRNLGNTCFMNSILQCLSNTRELRDYCLQRLYMRDLHHGSNAHTALVEEFAKLIQTIWTSSPNDVVSPSEFKTQIQRYAPRFVGYNQQDAQEFLRFLLDGLHNEVNRVTLRPKSNPENLDHLPDDEKGRQMWRKYLEREDSRIGDLFVGQLKSSLTCTDCGYCSTVFDPFWDLSLPIAKRGYPEVTLMDCMRLFTKEDVLDGDEKPTCCRCRGRKRCIKKFSIQRFPKILVLHLKRFSESRIRTSKLTTFVNFPLRDLDLREFASENTNHAVYNLYAVSNHSGTTMGGHYTAYCRSPGTGEWHTFNDSSVTPMSSSQVRTSDAYLLFYELAS

SEQ ID NO: 127 - protein, 628 aa, Homo sapiens
LSVRGITNLGNTCFFNAVMQNLAQTYTLTDLMNEIKESSTKLKIFPSSDSQLDPLVVELSRPGPLTSALFLFLHSMKETEKGPLSPKVLFNQLCQKAPRFKDFQQQDSQELLHYLLDAVRTEETKRIQASILKAFNNPTTKTADDETRKKVKAYGKEGVKMNFIDRIFIGELTSTVMCEECANISTVKDPFIDISLPIIEERVSKPLLWGRMNKYRSLRETDHDRYSGNVTIENIHQPRAAKKHSSSKDKSQLIHDRKCIRKLSSGETVTYQKNENLEMNGDSLMFASLMNSESRLNESPTDDSEKEASHSESNVDADSEPSESESASKQTGLFRSSSGSGVQPDGPLYPLSAGKLLYTKETDSGDKEMAEAISELRLSSTVTGDQDFDRENQPLNISNNLCFLEGKHLRSYSPQNAFQTLSQSYITTSKECSIQSCLYQFTSMELLMGNNKLLCENCTKNKQKYQEETSFAEKKVEGVYTNARKQLLISAVPAVLILHLKRFHQAGLSLRKVNRHVDFPLMLDLAPFCSATCKNASVGDKVLYGLYGIVEHSGSMREGHYTAYVKVRTPSRKLSEHNTKKKNVPGLKAADNESAGQWVHVSDTYLQVVPESRALSAQAYLLFYERVL

SEQ ID NO: 128 - protein, 876 aa, Homo sapiens
TEKGATGLSNLGNTCFMNSSIQCVSNTQPLTQYFISGRHLYELNRTNPIGMKGHMAKCYGDLVQELWSGTQKNVAPLKLRWTIAKYAPRFNGFQQQDSQELLAFLLDGLHEDLNRVHEKPYVELKDSDGRPDWEVAAEAWDNHLRRNRSIVVDLFHGQLRSQVKCKTCGHISVRFDPFNFLSLPLPMDSYMHLEITVIKLDGTTPVRYGLRLNMDEKYTGLKKQLSDLCGLNSEQILLAEVHGSNIKNFPQDNQKVRLSVSGFLCAFEIPVPVSPISASSPTQTDFSSSPSTNEMFTLTTNGDLPRPIFIPNGMPNTVVPCGTEKNFTNGMVNGHMPSLPDSPFTGYIIAVHRKMMRTELYFLSSQKNRPSLFGMPLIVPCTVHTRKKDLYDAVWIQVSRLASPLPPQEASNHAQDCDDSMGYQYPFTLRVVQKDGNSCAWCPWYRFCRGCKIDCGEDRAFIGNAYIAVDWDPTALHLRYQTSQERVVDEHESVEQSRRAQAEPINLDSCLRAFTSEEELGENEMYYCSKCKTHCLATKKLDLWRLPPILIIHLKRFQFVNGRWIKSQKIVKFPRESFDPSAFLVPRDPALCQHKPLTPQGDELSEPRILAREVKKVDAQSSAGEEDVLLSKSPSSLSANIISSPKGSPSSSRKSGTSCPSSKNSSPNSSPRTLGRSKGRLRLPQIGSKNKLSSSKENLDASKENGAGQICELADALSRGHVLGGSQPELVTPQDHEVALANGFLYEHEACGNGYSNGQLGNHSEEDSTDDQREDTRIKPIYNLYAISCHSGILGGGHYVTYAKNPNCKWYCYNDSSCKELHPDEIDTDSAYILFYEQQGIDYAQFLPKTDGKKMADTSSMDEDFESDYKKYCVLQ

SEQ ID NO: 129 - protein, 300 aa, Homo sapiens
AVGAGLQNMGNTCYVNASLQCLTYTPPLANYMLSREHSQTCHRHKGCMLCTMQAHITRALHNPGHVIQPSQALAAGFHRGKQEDAHEFLMFTVDAMKKACLPGHKQVDHHSKDTTLIHQIFGGYWRSQIKCLHCHGISDTFDPYLDIALDIQAAQSVQQALEQLVKPEELNGENAYHCGVCLQRAPASKTLTLHTSAKVLILVLKRFSDVTGNKIAKNVQYPECLDMQPYMSQQNTGPLVYVLYAVLVHAGWSCHNGHYFSYVKAQEGQWYKMDDAEVTASSITSVLSQQAYVLFYIQKS

SEQ ID NO: 130 - protein, 313 aa, Homo sapiens
RVGAGLQNLGNTCFANAALQCLTYTPPLANYMLSHEHSKTCHAEGFCMMCTMQAHITQALSNPGDVIKPMFVINEMRRIARHFRFGNQEDAHEFLQYTVDAMQKACLNGSNKLDRHTQATTLVCQIFGGYLRSRVKCLNCKGVSDTFDPYLDITLEIKAAQSVNKALEQFVKPEQLDGENSYKCSKCKKMVPASKRFTIHRSSNVLTLSLKRFANFTGGKIAKDVKYPEYLDIRPYMSQPNGEPIVYVLYAVLVHTGFNCHAGHYFCYIKASNGLWYQMNDSIVSTSDIRSVLSQQAYVLFYIRSHDVKNGGE

SEQ ID NO: 131 - protein, 344 aa, Homo sapiens
AVGAGLQKIGNTFYVNVSLQCLTYTLPLSNYMLSREDSQTCHLHKCCMFCTMQAHITWALHSPGHVIQPSQVLAAGFHRGEQEDAHEFLMFTVDAMKKACLPGHKQLDHHSKDTTLIHQIFGAYWRSQIKYLHCHGVSDTFDPYLDIALDIQAAQSVKQALEQLVKPKELNGENAYHCGLCLQKAPASKTLTLPTSAKVLILVLKRFSDVTGNKLAKNVQYPKCRDMQPYMSQQNTGPLVYVLYAVLVHAGWSCHNGHYFSYVKAQEGQWYKMDDAEVTASGITSVLSQQAYVLFYIQKSEWERHSESVSRGREPRALGAEDTDRPATQGELKRDHPCLQVPEL

SEQ ID NO: 132 - protein, 344 aa, Homo sapiens
AVGAGLQNMGNTCYVNASLQCLTYTPPLANYMLSREHSQTCHRHKGCMLCTMQAHITRALHNPGHVIQPSQALAAGFHRGKQEDAHEFLMFTVDAMKKACLPGHKQVDHHSKDTTLIHQIFGGYWRSQIKCLHCHGISDTFDPYLDIALDIQAAQSVQQALEQLVKPEELNGENAYHCGVCLQRAPASKTLTLHTSAKVLILVLKRFSDVTGNKIAKNVQYPECLDMQPYMSQQNTGPLVYVLYAVLVHAGWSCHNGHYFSYVKAQEGQWYKMDDAEVTAASITSVLSQQAYVLFYIQKSEWERHSESVSRGREPRALGAEDTDRRATQGELKRDHPCLQAPEL

SEQ ID NO: 133 - protein, 533 aa, Homo sapiens
YGPGYTGLKNLGNSCYLSSVMQAIFSIPEFQRAYVGNLPRIFDYSPLDPTQDFNTQMTKLGHGLLSGQYSKPPVKSELIEQVMKEEHKPQQNGISPRMFKAFVSKSHPEFSSNRQQDAQEFFLHLVNLVERNRIGSENPSDVFRFLVEERIQCCQTRKVRYTERVDYLMQLPVAMEAATNKDELIAYELTRREAEANRRPLPELVRAKIPFSACLQAFSEPENVDDFWSSALQAKSAGVKTSRFASFPEYLVVQIKKFTFGLDWVPKKFDVSIDMPDLLDINHLRARGLQPGEEELPDISPPIVIPDDSKDRLMNQLIDPSDIDESSVMQLAEMGFPLEACRKAVYFTGNMGAEVAFNWIIVHMEEPDFAEPLTMPGYGGAASAGASVFGASGLDNQPPEEIVAIITSMGFQRNQAIQALRATNNNLERALDWIFSHPEFEEDSDFVIEMENNANANIISEAKPEGPRVKDGSGTYELFAFISHMGTSTMSGHYICHIKKEGRWVIYNDHKVCASERPPKDLGYMYFYRRIPS

SEQ ID NO: 134 - protein, 629 aa, Homo sapiens
KGQPGICGLTNLGNTCFMNSALQCLSNVPQLTEYFLNNCYLEELNFRNPLGMKGEIAEAYADLVKQAWSGHHRSIVPHVFKNKVGHFASQFLGYQQHDSQELLSFLLDGLHEDLNRVKKKEYVELCDAAGRPDQEVAQEAWQNHKRRNDSVIVDTFHGLFKSTLVCPDCGNVSVTFDPFCYLSVPLPISHKRVLEVFFIPMDPRRKPEQHRLVVPKKGKISDLCVALSKHTGISPERMMVADVFSHRFYKLYQLEEPLSSILDRDDIFVYEVSGRIEAIEGSREDIVVPVYLRERTPARDYNNSYYGLMLFGHPLLVSVPRDRFTWEGLYNVLMYRLSRYVTKPNSDDEDDGDEKEDDEEDKDDVPGPSTGGSLRDPEPEQAGPSSGVTNRCPFLLDNCLGTSQWPPRRRRKQLFTLQTVNSNGTSDRTTSPEEVHAQPYIAIDWEPEMKKRYYDEVEAEGYVKHDCVGYVMKKAPVRLQECIELFTTVETLEKENPWYCPSCKQHQLATKKLDLWMLPEILIIHLKRFSYTKFSREKLDTLVEFPIRDLDFSEFVIQPQNESNPELYKYDLIAVSNHYGGMRDGHYTTFACNKDSGQWHYFDDNSVSPVNENQIESKAAYVLFYQRQD

SEQ ID NO: 135 - protein, 300 aa, Homo sapiens
AVGAGLQNMGNTCYENASLQCLTYTLPLANYMLSREHSQTCQRPKCCMLCTMQAHITWALHSPGHVIQPSQALAAGFHRGKQEDVHEFLMFTVDAMKKACLPGHKQVDHHCKDTTLIHQIFGGCWRSQIKCLHCHGISDTFDPYLDIALDIQAAQSVKQALEQLVKPEELNGENAYHCGLCLQRAPASNTLTLHTSAKVLILVLKRFSDVAGNKLAKNVQYPECLDMQPYMSQQNTGPLVYVLYAVLVHAGWSCHDGHYFSYVKAQEVQWYKMDDAEVTVCSIISVLSQQAYVLFYIQKS

SEQ ID NO: 136 - protein, 387 aa, Homo sapiens
ASAMELPCGLTNLGNTCYMNATVQCIRSVPELKDALKRYAGALRASGEMASAQYITAALRDLFDSMDKTSSSIPPIILLQFLHMAFPQFAEKGEQGQYLQQDANECWIQMMRVLQQKLEAIEDDSVKETDSSSASAATPSKKKSLIDQFFGVEFETTMKCTESEEEEVTKGKENQLQLSCFINQEVKYLFTGLKLRLQEEITKQSPTLQRNALYIKSSKISRLPAYLTIQMVRFFYKEKESVNAKVLKDVKFPLMLDMYELCTPELQEKMVSFRSKFKDLEDKKVNQQPNTSDKKSSPQKEVKYEPFSFADDIGSNNCGYYDLQAVLTHQGRSSSSGHYVSWVKRKQDEWIKFDDDKVSIVTPEDILRLSGGGDWHIAYVLLYGPRR

SEQ ID NO: 137 - protein, 630 aa, Homo sapiens
SHIQPGLCGLGNLGNTCFMNSALQCLSNTAPLTDYFLKDEYEAEINRDNPLGMKGEIAEAYAELIKQMWSGRDAHVAPRMFKTQVGRFAPQFSGYQQQDSQELLAFLLDGLHEDLNRVKKKPYLELKDANGRPDAVVAKEAWENHRLRNDSVIVDTFHGLFKSTLVCPECAKVSVTFDPFCYLTLPLPLKKDRVMEVFLVPADPHCRPTQYRVTVPLMGAVSDLCEALSRLSGIAAENMVVADVYNHRFHKIFQMDEGLNHIMPRDDIFVYEVCSTSVDGSECVTLPVYFRERKSRPSSTSSASALYGQPLLLSVPKHKLTLESLYQAVCDRISRYVKQPLPDEFGSSPLEPGACNGSRNSCEGEDEEEMEHQEEGKEQLSETEGSGEDEPGNDPSETTQKKIKGQPCPKRLFTFSLVNSYGTADINSLAADGKLLKLNSRSTLAMDWDSETRRLYYDEQESEAYEKHVSMLQPQKKKKTTVALRDCIELFTTMETLGEHDPWYCPNCKKHQQATKKFDLWSLPKILVVHLKRFSYNRYWRDKLDTVVEFPIRGLNMSEFVCNLSARPYVYDLIAVSNHYGAMGVGHYTAYAKNKLNGKWYYFDDSNVSLASEDQIVTKAAYVLFYQRRD

SEQ ID NO: 138 - protein, 595 aa, Homo sapiens
KICHGLPNLGNTCYMNAVLQSLLSIPSFADDLLNQSFPWGKIPLNALTMCLARLLFFKDTYNIEIKEMLLLNLKKAISAAAEIFHGNAQNDAHEFLAHCLDQLKDNMEKLNTIWKPKSEFGEDNFPKQVFADDPDTSGFSCPVITNFELELLHSIACKACGQVILKTELNNYLSINLPQRIKAHPSSIQSTFDLFFGAEELEYKCAKCEHKTSVGVHSFSRLPRILIVHLKRYSLNEFCALKKNDQEVIISKYLKVSSHCNEGTRPPLPLSEDGEITDFQLLKVIRKMTSGNISVSWPATKESKDILAPHIGSDKESEQKKGQTVFKGASRRQQQKYLGKNSKPNELESVYSGDRAFIEKEPLAHLMTYLEDTSLCQFHKAGGKPASSPGTPLSKVDFQTVPENPKRKKYVKTSKFVAFDRIINPTKDLYEDKNIRIPERFQKVSEQTQQCDGMRICEQAPQQALPQSFPKPGTQGHTKNLLRPTKLNLQKSNRNSLLALGSNKNPRNKDILDKIKSKAKETKRNDDKGDHTYRLISVVSHLGKTLKSGHYICDAYDFEKQIWFTYDDMRVLGIQEAQMQEDRRCTGYIFFYMHN

SEQ ID NO: 139 - protein, 723 aa, Homo sapiens
LPGFTGLVNLGNTCFMNSVIQSLSNTRELRDFFHDRSFEAEINYNNPLGTGGRLAIGFAVLLRALWKGTHHAFQPSKLKAIVASKASQFTGYAQHDAQEFMAFLLDGLHEDLNRIQNKPYTETVDSDGRPDEVVAEEAWQRHKMRNDSFIVDLFQGQYKSKLVCPVCAKVSITFDPFLYLPVPLPQKQKVLPVFYFAREPHSKPIKFLVSVSKENSTASEVLDSLSQSVHVKPENLRLAEVIKNRFHRVFLPSHSLDTVSPSDTLLCFELLSSELAKERVVVLEVQQRPQVPSVPISKCAACQRKQQSEDEKLKRCTRCYRVGYCNQLCQKTHWPDHKGLCRPENIGYPFLVSVPASRLTYARLAQLLEGYARYSVSVFQPPFQPGRMALESQSPGCTTLLSTGSLEAGDSERDPIQPPELQLVTPMAEGDTGLPRVWAAPDRGPVPSTSGISSEMLASGPIEVGSLPAGERVSRPEAAVPGYQHPSEAMNAHTPQFFIYKIDSSNREQRLEDKGDTPLELGDDCSLALVWRNNERLQEFVLVASKELECAEDPGSAGEAARAGHFTLDQCLNLFTRPEVLAPEEAWYCPQCKQHREASKQLLLWRLPNVLIVQLKRFSFRSFIWRDKINDLVEFPVRNLDLSKFCIGQKEEQLPSYDLYAVINHYGGMIGGHYTACARLPNDRSSQRSDVGWRLFDDSTVTTVDESQVVTRYAYVLFYRRRN

SEQ ID NO: 140 - protein, 386 aa, Homo sapiens
SLQPRGLINKGNWCYINATLQALVACPPMYHLMKFIPLYSKVQRPCTSTPMIDSFVRLMNEFTNMPVPPKPRQALGDKIVRDIRPGAAFEPTYIYRLLTVNKSSLSEKGRQEDAEEYLGFILNGLHEEMLNLKKLLSPSNEKLTISNGPKNHSVNEEEQEEQGEGSEDEWEQVGPRNKTSVTRQADFVQTPITGIFGGHIRSVVYQQSSKESATLQPFFTLQLDIQSDKIRTVQDALESLVARESVQGYTTKTKQEVEISRRVTLEKLPPVLVLHLKRFVYEKTGGCQKLIKNIEYPVDLEISKELLSPGVKNKNFKCHRTYRLFAVVYHHGNSATGGHYTTDVFQIGLNGWLRIDDQTVKVINQYQVVKPTAERTAYLLYYRRVD

SEQ ID NO: 141 - protein, 658 aa, Homo sapiens
MDRCKHVGRLRLAQDHSILNPQKWCCLECATTESVWACLKCSHVACGRYIEDHALKHFEETGHPLAMEVRDLYVFCYLCKDYVLNDNPEGDLKLLRSSLLAVRGQKQDTPVRRGRTLRSMASGEDVVLPQRAPQGQPQMLTALWYRRQRLLARTLRLWFEKSSRGQAKLEQRRQEEALERKKEEARRRRREVKRRLLEELASTPPRKSARLLLHTPRDAGPAASRPAALPTSRRVPAATLKLRRQPAMAPGVTGLRNLGNTCYMNSILQVLSHLQKFRECFLNLDPSKTEHLFPKATNGKTQLSGKPTNSSATELSLRNDRAEACEREGFCWNGRASISRSLELIQNKEPSSKHISLCRELHTLFRVMWSGKWALVSPFAMLHSVWSLIPAFRGYDQQDAQEFLCELLHKVQQELESEGTTRRILIPFSQRKLTKQVLKVVNTIFHGQLLSQVTCISCNYKSNTIEPFWDLSLEFPERYHCIEKGFVPLNQTECLLTEMLAKFTETEALEGRIYACDQCNSKRRKSNPKPLVLSEARKQLMIYRLPQVLRLHLKRFRWSGRNHREKIGVHVVFDQVLTMEPYCCRDMLSSLDKETFAYDLSAVVMHHGKGFGSGHYTAYCYNTEGGFWVHCNDSKLNVCSVEEVCKTQAYILFYTQRT

SEQ ID NO: 142 - protein, 300 aa, Homo sapiens
AVGAGLQNMGNTCYLNASLQCLTYTPPLANYMLSREHSQTCQRPKCCMLCTMQAHITWALHSPGHVIQPSQALAAGFHRGKQEDAHEFLMFTVDAMKKACLPGHKQVDHHSKDTTLIHQIFGGCWRSQIKCLHCHGISDTFDPYLDIALDIQAAQSVKQALEQLVKPEELNGENAYPCGLCLQRAPASNTLTLHTSAKVLILVLKRFCDVTGNKLAKNVQYPECLDMQPYMSQQNTGPLVYVLYAVLVHAGWSCHNGYYFSYVKAQEGQWYKMDDAEVTACSITSVLSQQAYVLFYIQKS

SEQ ID NO: 143 - protein, 311 aa, Homo sapiens; identical to SEQ ID NO: 119

SEQ ID NO: 144 - protein, 338 aa, Homo sapiens
AQGLAGLRNLGNTCFMNSILQCLSNTRELRDYCLQRLYMRDLHHGSNAHTALVEEFAKLIQTIWTSSPNDVVSPSEFKTQIQRYAPRFVGYNQQDAQEFLRFLLDGLHNEVNRVTLRPKSNPENLDHLPDDEKGRQMWRKYLEREDSRIGDLFVGQLKSSLTCTDCGYCSTVFDPFWDLSLPIAKRGYPEVTLMDCMRLFTKEDVLDGDEKPTCCRCRGRKRCIKKFSIQRFPKILVLHLKRFSESRIRTSKLTTFVNFPLRDLDLREFASENTNHAVYNLYAVSNHSGTTMGGHYTAYCRSPGTGEWHTFNDSSVTPMSSSQVRTSDAYLLFYELAS

SEQ ID NO: 145 - protein, 363 aa, Homo sapiens
MIGKKKGIQGHYNSCYLDSTLFCLFAFSSVLDTVLLRPKEKNDVEYYSETQELLRTEIVNPLRIYGYVCATKIMKLRKILEKVEAASGFTSEEKDPEEFLNILFHHILRVEPLLKIRSAGQKVQDCYFYQIFMEKNEKVGVPTIQQLLEWSFINSNLKFAEAPSCLIIQMPRFGKDFKLFKKIFPSLELNITDLLEDTPRQCRICGGLAMYECRECYDDPDISAGKIKQFCKTCNTQVHLHPKRLNHKYNPVSLPKDLPDWDWRHGCIPCQNMELFAVLCIETSHYVAFVKYGKDDSAWLFFDSMADRDGGQNGFNIPQVTPCPEVGEYLKMSLEDLHSLDSRRIQGCARRLLCDAYMCMYQS

SEQ ID NO: 146 - protein, 300 aa, Homo sapiens; identical to SEQ ID NO: 116

SEQ ID NO: 147 - protein, 341 aa, Homo sapiens
LGNTCFMNCIVQALTHTPLLRDFFLSDRHRCEMQSPSSCLVCEMSSLFQEFYSGHRSPHIPYKLLHLVWTHARHLAGYEQQDAHEFLIAALDVLHRHCKGDDNGKKANNPNHCNCIIDQIFTGGLQSDVTCQVCHGVSTTIDPFWDISLDLPGSSTPFWPLSPGSEGNVVNGESHVSGTTTLTDCLRRFTRPEHLGSSAKIKCSGCHSYQESTKQLTMKKLPIVACFHLKRFEHSAKLRRKITTYVSFPLELDMTPFMASSKESRMNGQYQQPTDSLNNDNKYSLFAVVNHQGTLESGHYTSFIRQHKDQWFKCDDAIITKASIKDVLDSEGYLLFYHKQF

SEQ ID NO: 148 - protein, 440 aa, Homo sapiens
KGLVPGLVNLGNTCFMNSLLQGLSACPAFIRWLEEFTSQYSRDQKEPPSHQYLSLTLLHLLKALSCQEVTDDEVLDASCLLDVLRMYRWQISSFEEQDAHELFHVITSSLEDERDRQPRVTHLFDVHSLEQQSEITPKQITCRTRGSPHPTSNHWKSQHPFHGRLTSNMVCKHCEHQSPVRFDTFDSLSLSIPAATWGHPLTLDHCLHHFISSESVRDVVCDNCTKIEAKGTLNGEKVEHQRTTFVKQLKLGKLPQCLCIHLQRLSWSSHGTPLKRHEHVQFNEFLMMDIYKYHLLGHKPSQHNPKLNKNPGPTLELQDGPGAPTPVLNQPGAPKTQIFMNGACSPSLLPTLSAPMPFPLPVVPDYSSSTYLFRLMAVVVHHGDMHSGHFVTYRRSPPSARNPLSTSNQWLWVSDDTVRKASLQEVLSSSAYLLFYERVL

SEQ ID NO: 149 - protein, 496 aa, Homo sapiens
GWPVGLKNVGNTCWFSAVIQSLFQLPEFRRLVLSYSLPQNVLENCRSHTEKRNIMFMQELQYLFALMMGSNRKFVDPSAALDLLKGAFRSSEEQQQDVSEFTHKLLDWLEDAFQLAVNVNSPRNKSENPMVQLFYGTFLTEGVREGKPFCNNETFGQYPLQVNGYRNLDECLEGAMVEGDVELLPSDHSVKYGQERWFTKLPPVLTFELSRFEFNQSLGQPEKIHNKLEFPQIIYMDRYMYRSKELIRNKRECIRKLKEEIKILQQKLERYVKYGSGPARFPLPDMLKYVIEFASTKPASESCPPESDTHMTLPLSSVHCSVSDQTSKESTSTESSSQDVESTFSSPEDSLPKSKPLTSSRSSMEMPSQPAPRTVTDEEINFVKTCLQRWRSEIEQDIQDLKTCIASTTQTIEQMYCDPLLRQVPYRLHAVLVHEGQANAGHYWAYIYNQPRQSWLKYNDISVTESSWEEVERDSYGGLRNVSAYCLMYINDKLPY

SEQ ID NO: 150 - protein, 300 aa, Homo sapiens
AVGAGLQNMGNTCYENASLQCLTYTPPLANYMLSREHSQTCQRPKCCMLCTMQAHITWALHSPGHVIQPSQALAAGFHRGKQEDAHEFLMFTVDAMKKACLPGHKQVDHHSKDTTLIHQIFGGCWRSQIKCLHCHGISDTFDPYLDIALDIQAAQSVKQALEQLVKPEELNGENAYHCGLCLQRAPASKTLTLHTSAKVLILVLKRFSDVTGNKLAKNVQYPECLDMQPYMSQQNTGPLVYVLYAVLVHAGWSCHDGHYFSYVKAQEGQWYKMDDAKVTACSITSVLSQQAYVLFYIQKS

SEQ ID NO: 151 - protein, 644 aa, Homo sapiens
PVPGVAGLRNHGNTCFMNATLQCLSNTELFAEYLALGQYRAGRPEPSPDPEQPAGRGAQGQGEVTEQLAHLVRALWTLEYTPQHSRDFKTIVSKNALQYRGNSQHDAQEFLLWLLDRVHEDLNHSVKQSGQPPLKPPSETDMMPEGPSFPVCSTFVQELFQAQYRSSLTCPHCQKQSNTFDPFLCISLPIPLPHTRPLYVTVVYQGKCSHCMRIGVAVPLSGTVARLREAVSMETKIPTDQIVLTEMYYDGFHRSFCDTDDLETVHESDCIFAFETPEIFRPEGILSQRGIHLNNNLNHLKFGLDYHRLSSPTQTAAKQGKMDSPTSRAGSDKIVLLVCNRACTGQQGKRFGLPFVLHLEKTIAWDLLQKEILEKMKYFLRPTVCIQVCPFSLRVVSVVGITYLLPQEEQPLCHPIVERALKSCGPGGTAHVKLVVEWDKETRDFLFVNTEDEYIPDAESVRLQRERHHQPQTCTLSQCFQLYTKEERLAPDDAWRCPHCKQLQQGSITLSLWTLPDVLIIHLKRFRQEGDRRMKLQNMVKFPLTGLDMTPHVVKRSQSSWSLPSHWSPWRRPYGLGRDPEDYIYDLYAVCNHHGTMQGGHYTAYCKNSVDGLWYCFDDSDVQQLSEDEVCTQTAYILFYQRRT

SEQ ID NO: 152 - protein, 344 aa, Homo sapiens
AVGAGLQNMGNTCYVNASLQCLTYTPPLANYMLSREHSQTCHRHKGCMLCTMQAHITRALHNPGHVIQPSQALAAGFHRGKQEDAHEFLMFTVDAMKKACLPGHKQVDHHSKDTTLIHQIFGGYWRSQIKCLHCHGISDTFDPYLDIALDIQAAQSVQQALEQLVKPEELNGENAYHCGVCLQRAPASKTLTLHTSAKVLILVLKRFSDVTGNKIAKNVQYPECLDMQPYMSQTNTGPLVYVLYAVLVHAGWSCHNGHYFSYVKAQEGQWYKMDDAEVTASSITSVLSQQAYVLFYIQKSEWERHSESVSRGREPRALGAEDTDRRATQGELKRDHPCLQAPEL

SEQ ID NO: 153 - protein, 300 aa, Homo sapiens
AVGAGLQNMGNTCYVNASLQCLTYTPPLANYMLSREHSQTCHRHKGCMLCTMQAHITRALHNPGHVIQPSQALAAGFHRGKQEDAHEFLMFTVDAMKKACLPGHKQVDHHSKDTTLIHQIFGGYWRSQIKCLHCHGISDTFDPYLDIALDIQAAQSVQQALEQLVKPEELNGENAYHCGVCLQRAPASKTLTLHTSAKVLILVLKRFSDVTGNKIDKNVQYPECLDMKLYMSQTNSGPLVYVLYAVLVHAGWSCHNGHYFSYVKAQEGQWYKMDDAEVTASSITSVLSQQAYVLFYIQKS

SEQ ID NO: 154 - protein, 382 aa, Homo sapiens
ETGYVGLVNQAMTCYLNSLLQTLFMTPEFRNALYKWEFEESEEDPVTSIPYQLQRLFVLLQTSKKRAIETTDVTRSFGWDSSEAWQQHDVQELCRVMFDALEQKWKQTEQADLINELYQGKLKDYVRCLECGYEGWRIDTYLDIPLVIRPYGSSQAFASVEEALHAFIQPEILDGPNQYFCERCKKKCDARKGLRFLHFPYLLTLQLKRFDFDYTTMHRIKLNDRMTFPEELDMSTFIDVEDEKSPQTESCTDSGAENEGSCHSDQMSNDFSNDDGVDEGICLETNSGTEKISKSGLEKNSLIYELFSVMVHSGSAAGGHYYACIKSFSDEQWYSFNDQHVSRITQEDIKKTHGGSSGSRGYYSSAFASSTNAYMLIYRLKD

SEQ ID NO: 155 - protein, 350 aa, Homo sapiens
YTVGLRGLINLGNTCFMNCIVQALTHIPLLKDFFLSDKHKCIMTSPSLCLVCEMSSLFHAMYSGSRTPHIPYKLLHLIWIHAEHLAGYRQQDAHEFLIAILDVLHRHSKDDSGGQEANNPNCCNCIIDQIFTGGLQSDVTCQACHSVSTTIDPCWDISLDLPGSCATFDSQNPERADSTVSRDDHIPGIPSLTDCLQWFTRPEHLGSSAKIKCNSCQSYQESTKQLTMKKLPIVACFHLKRFEHVGKQRRKINTFISFPLELDMTPFLASTKESRMKEGQPPTDCVPNENKYSLFAVINHHGTLESGHYTSFIRQQKDQWFSCDDAIITKATIEDLLYSEGYLLFYHKQG

SEQ ID NO: 156 - protein, 306 aa, Homo sapiens
RVGAGLHNLGNTCFLNATIQCLTYTPPLANYLLSKEHARSCHQGSFCMLCVMQNHIVQAFANSGNAIKPVSFIRDLKKIARHFRFGNQEDAHEFLRYTIDAMQKACLNGCAKLDRQTQATTLVHQIFGGYLRSRVKCSVCKSVSDTYDPYLDVALEIRQAANIVRALELFVKADVLSGENAYMCAKCKKKVPASKRFTIHRTSNVLTLSLKRFANFSGGKITKDVGYPEFLNIRPYMSQNNGDPVMYGLYAVLVHSGYSCHAGHYYCYVKASNGQWYQMNDSLVHSSNVKVVLNQQAYVLFYLRIP

SEQ ID NO: 157 - protein, 411 aa, Homo sapiens
TPGVTGLRNLGNTCYMNSVLQVLSHLLIFRQCFLKLDLNQWLAMTASEKTRSCKHPPVTDTVVYQMNECQEKDTGFVCSRQSSLSSGLSGGASKGRKMELIQPKEPTSQYISLCHELHTLFQVMWSGKWALVSPFAMLHSVWRLIPAFRGYAQQDAQEFLCELLDKIQRELETTGTSLPALIPTSQRKLIKQVLNVVNNIFHGQLLSQVTCLACDNKSNTIEPFWDLSLEFPERYQCSGKDIASQPCLVTEMLAKFTETEALEGKIYVCDQCNSKRRRFSSKPVVLTEAQKQLMICHLPQVLRLHLKRFRWSGRNNREKIGVHVGFEEILNMEPYCCRETLKSLRPECFIYDLSAVVMHHGKGFGSGHYTAYCYNSEGGFWVHCNDSKLSMCTMDEVCKAQAYILFYTQRV

SEQ ID NO: 158 - protein, 337 aa, Homo sapiens
PALTGLRNLGNTCYMNSILQCLCNAPHLADYFNRNCYQDDINRSNLLGHKGEVAEEFGIIMKALWTGQYRYISPKDFKITIGKINDQFAGYSQQDSQELLLFLMDGLHEDLNKADNRKRYKEENNDHLDDFKAAEHAWQKHKQLNESIIVALFQGQFKSTVQCLTCHKKSRTFEAFMYLSLPLASTSKCTLQDCLRLFSKEEKLTDNNRFYCSHCRARRDSLKKIEIWKLPPVLLVHLKRFSYDGRWKQKLQTSVDFPLENLDLSQYVIGPKNNLKKYNLFSVSNHYGGLDGGHYTAYCKNAARQRWFKFDDHEVSDISVSSVKSSAAYILFYTSLG

SEQ ID NO: 159 - protein, 614 aa, Homo sapiens
QQLQGFSNLGNTCYMNAILQSLFSLQSFANDLLKQGIPWKKIPLNALIRRFAHLLVKKDICNSETKKDLLKKVKNAISATAERFSGYMQNDAHEFLSQCLDQLKEDMEKLNKTWKTEPVSGEENSPDISATRAYTCPVITNLEFEVQHSIICKACGEIIPKREQFNDLSIDLPRRKKPLPPRSIQDSLDLFFRAEELEYSCEKCGGKCALVRHKFNRLPRVLILHLKRYSFNVALSLNNKIGQQVIIPRYLTLSSHCTENTKPPFTLGWSAHMAISRPLKASQMVNSCITSPSTPSKKFTFKSKSSLALCLDSDSEDELKRSVALSQRLCEMLGNEQQQEDLEKDSKLCPIEPDKSELENSGFDRMSEEELLAAVLEISKRDASPSLSHEDDDKPTSSPDTGFAEDDIQEMPENPDTMETEKPKTITELDPASFTEITKDCDENKENKTPEGSQGEVDWLQQYDMEREREEQELQQALAQSLQEQEAWEQKEDDDLKRATELSLQEFNNSFVDALGSDEDSGNEDVFDMEYTEAEAEELKRNAETGNLPHSYRLISVVSHIGSTSSSGHYISDVYDIKKQAWFTYNDLEVSKIQEAAVQSDRDRSGYIFFYMHK

SEQ ID NO: 160 - protein, 300 aa, Homo sapiens
AVGAGLQNMGNTCYVNASLQCLTYTPPLANYMLSREHSQTCHRHKGCMLCTMQAHITRALHNPGHVIQPSQALAAGFHRGKQEDAHEFLMFTVDAMKKACLPGHKQVDHPSKDTTLIHQIFGGYWRSQIKCLHCHGISDTFDPYLDIALDIQAAQSVQQALEQLVKPEELNGENAYHCGVCLQRAPASKTLTLHTSAKVLILVLKRFSDVTGNKIAKNVQYPECLDMQPYMSQQNTGPLVYVLYAVLVHAGWSCHNGHYFSYVKAQEGQWYKMDDAEVTAASITSVLSQQAYVLFYIQKS

SEQ ID NO: 161 - protein, 300 aa, Homo sapiens
AVGAGLQNMGNTCYENASLQCLTYTLPLANYMLSREHSQTCQRPKCCMLCTMQAHITWALHSPGHVIQPSQALASGFHRGKQEDVHEFLMFTVDAMKKACLPGHKQVDHHSKDTTLIHQIFGGCWRSQIKCLHCHGISDTFDPYLDIALDIQAAQSVKQALEQLVKPEELNGENAYHCGLCLQRAPASNTLTLHTSAKVLILVLKRFSDVAGNKLAKNVQYPECLDMQPYMSQQNTGPLVYVLYAVLVHAGWSCHDGHYFSYVKAQEGQWYKMDDAEVTVCSITSVLSQQAYVLFYIQKS

SEQ ID NO: 162 - protein, 402 aa, Homo sapiens
APSKGLSNEPGQNSCFLNSALQVLWHLDIFRRSFRQLTTHKCMGDSCIFCALKGIFNQFQCSSEKVLPSDTLRSALAKTFQDEQRFQLGIMDDAAECFENLLMRIHFHIADETKEDICTAQHCISHQKFAMTLFEQCVCTSCGATSDPLPFIQMVHYISTTSLCNQAICMLERREKPSPSMFGELLQNASTMGDLRNCPSNCGERIRIRRVLMNAPQIITIGLVWDSDHSDLAEDVIHSLGTCLKLGDLFFRVTDDRAKQSELYLVGMICYYGKHYSTFFFQTKIRKWMYFDDAHVKEIGPKWKDVVTKCIKGHYQPLLLLYADPQGTPVSTQDLPPQAEFQSYSRTCYDSEDSGREPSISSDTRTDSSTESYPYKHSHHESVVSHFSSDSQGTVIYNVEND

SEQ ID NO: 163 - protein, 336 aa, Homo sapiens
LPGIVGLNNIKANDYANAVLQALSNVPPLRNYFLEEDNYKNIKRPPGDIMFLLVQRFGELMRKLWNPRNFKAHVSPHEMLQAVVLCSKKTFQITKQGDGVDFLSWFLNALHSALGGTKKKKKTIVTDVFQGSMRIFTKKLPHPDLPAEEKEQLLHNDEYQETMVESTFMYLTLDLPTAPLYKDEKEQLIIPQVPLFNILAKFNGITEKEYKTYKENFLKRFQLTKLPPYLIFCIKRFTKNNFFVEKNPTIVNFPITNVDLREYLSEEVQAVHKNTTYDLIANIVHDGKPSEGSYRIHVLHHGTGKWYELQDLQVTDILPQMITLSEAYIQIWKRRD

SEQ ID NO: 164 - protein, 492 aa, Homo sapiens
SDTGKIGLINLGNTCYVNSILQALFMASDFRHCVLRLTENNSQPLMTKLQWLFGFLEHSQRPAISPENFLSASWTPWFSPGTQQDCSEYLKYLLDRLHEEEKTGTRICQKLKQSSSPSPPEEPPAPSSTSVEKMFGGKIVTRICCLCCLNVSSREEAFTDLSLAFPPPERCRRRRLGSVMRPTEDITARELPPPTSAQGPGRVGPRRQRKHCITEDTPPTSLYIEGLDSKEAGGQSSQEERIEREEEGKEERTEKEEVGEEEESTRGEGEREKEEEVEEEEEKVEKETEKEAEQEKEEDSLGAGTHPDAAIPSGERTCGSEGSRSVLDLVNYFLSPEKLTAENRYYCESCASLQDAEKVVELSQGPCYLILTLLRFSFDLRTMRRRKILDDVSIPLLLRLPLAGGRGQAYDLCSVVVHSGVSSESGHYYCYAREGAARPAASLGTADRPEPENQWYLFNDTRVSFSSFESVSNVTSFFPKDTAYVLFYRQRP

SEQ ID NO: 165 - protein, 651 aa, Homo sapiens
EQPGLCGLSNLGNTCFMNSAIQCLSNTPPLTEYFLNDKYQEELNFDNPLGMRGEIAKSYAELIKQMWSGKFSYVTPRAFKTQVGRFAPQFSGYQQQDCQELLAFLLDGLHEDLNRIRKKPYIQLKDADGRPDKVVAEEAWENHLKRNDSIIVDIFHGLFKSTLVCPECAKISVTFDPFCYLTLPLPMKKERTLEVYLVRMDPLTKPMQYKVVVPKIGNILDLCTALSALSGIPADKMIVTDIYNHRFHRIFAMDENLSSIMERDDIYVFEININRTEDTEHVIIPVCLREKFRHSSYTHHTGSSLFGQPFLMAVPRNNTEDKLYNLLLLRMCRYVKISTETEETEGSLHCCKDQNINGNGPNGIHEEGSPSEMETDEPDDESSQDQELPSENENSQSEDSVGGDNDSENGLCTEDTCKGQLTGHKKRLFTFQFNNLGNTDINYIKDDTRHIRFDDRQLRLDERSFLALDWDPDLKKRYFDENAAEDFEKHESVEYKPPKKPFVKLKDCIELFTTKEKLGAEDPWYCPNCKEHQQATKKLDLWSLPPVLVVHLKRFSYSRYMRDKLDTLVDFPINDLDMSEFLINPNAGPCRYNLIAVSNHYGGMGGGHYTAFAKNKDDGKWYYFDDSSVSTASEDQIVSKAAYVLFYQRQD

SEQ ID NO: 166 - protein, 604 aa, Homo sapiens
QLQQGFPNLGNTCYMNAVLQSLFAIPSFADDLLTQGVPWEYIPFEALIMTLTQLLALKDFCSTKIKRELLGNVKKVISAVAEIFSGNMQNDAHEFLGQCLDQLKEDMEKLNATLNTGKECGDENSSPQMHVGSAATKVFVCPVVANFEFELQLSLICKACGHAVLKVEPNNYLSINLHQETKPLPLSIQNSLDLFFKEEELEYNCQMCKQKSCVARHTFSRLSRVLIIHLKRYSFNNAWLLVKNNEQVYIPKSLSLSSYCNESTKPPLPLSSSAPVGKCEVLEVSQEMISEINSPLTPSMKLTSESSDSLVLPVEPDKNADLQRFQRDCGDASQEQHQRDLENGSALESELVHFRDRAIGEKELPVADSLMDQGDISLPVMYEDGGKLISSPDTRLVEVHLQEVPQHPELQKYEKTNTFVEFNFDSVTESTNGFYDCKENRIPEGSQGMAEQLQQCIEESIIDEFLQQAPPPGVRKLDAQEHTEETLNQSTELRLQKADLNHLGALGSDNPGNKNILDAENTRGEAKELTRNVKMGDPLQAYRLISVVSHIGSSPNSGHYISDVYDFQKQAWFTYNDLCVSEISETKMQEARLHSGYIFFYMHN

SEQ ID NO: 167 - protein, 841 aa, Homo sapiens
KGATGLSNLGNTCFMNSSIQCVSNTQPLTQYFISGRHLYELNRTNPIGMKGHMAKCYGDLVQELWSGTQKSVAPLKLRRTIAKYAPKFDGFQQQDSQELLAFLLDGLHEDLNRVHEKPYVELKDSDGRPDWEVAAEAWDNHLRRNRSIIVDLFHGQLRSQVKCKTCGHISVRFDPNFLSLPLPMDSYMDLEITVIKLDGTTPVRYGLRLNMDEKYTGLKKQLRDLCGLNSEQILLAEVHDSNIKNFPQDNQKVQLSVSGFLCAFEIPVPSSPISASSPTQIDFSSSPSTNGMFTLTTNGDLPKPIFIPNGMPNTVVPCGTEKNFTNGMVNGHMPSLPDSPFTGYIIAVHRKMMRTELYFLSPQENRPSLFGMPLIVPCTVHTRKKDLYDAVWIQVSWLARPLPPQEASIHAQDRDNCMGYQYPFTLRVVQKDGNSCAWCPQYRFCRGCKIDCGEDRAFIGNAYIAVDWHPTALHLRYQTSQERVVDKHESVEQSRRAQAEPINLDSCLRAFTSEEELGESEMYYCSKCKTHCLATKKLDLWRLPPFLIIHLKRFQFVNDQWIKSQKIVRFLRESFDPSAFLVPRDPALCQHKPLTPQGDELSKPRILAREVKKVDAQSSAGKEDMLLSKSPSSLSANISSSPKGSPSSSRKSGTSCPSSKNSSPNSSPRTLGRSKGRLRLPQIGSKNKPSSSKKNLDASKENGAGQICELADALSRGHMRGGSQPELVTPQDHEVALANGFLYEHEACGNGCGDGYSNGQLGNHSEEDSTDDQREDTHIKPIYNLYAISCHSGILSGGHYITYAKNPNCKWYCYNDSSCEELHPDEIDTDSAYILFYEQQG

SEQ ID NO: 168 - protein, 446 aa, Homo sapiens
APTKGLLNEPGQNSCFLNSAVQVLWQLDIFRRSLRVLTGHVCQGDACIFCALKTIFAQFQHSREKALPSDNIRHALAESFKDEQRFQLGLMDDAAECFENMLERIHFHIVPSRDADMCTSKSCITHQKFAMTLYEQCVCRSCGASSDPLPFTEFVRYISTTALCNEVERMLERHERFKPEMFAELLQAANTTDDYRKCPSNCGQKIKIRRVLMNCPEIVTIGLVWDSEHSDLTEAVVRNLATHLYLPGLFYRVTDENAKNSELNLVGMICYTSQHYCAFAFHTKSSKWVFFDDANVKEIGTRWKDVVSKCIRCHFQPLLLFYANPDGTAVSTEDALRQVISWSHYKSVAENMGCEKPVIHKSDNLKENGFGDQAKQRENQKFPTDNISSSNRSHSHTGVGKGPAKLSHIDQREKIKDISRECALKAIEQKNLLSSQRKDLEKGQRK

SEQ ID NO: 169 - protein, 300 aa, Homo sapiens
AVGAGLQNMGNTCYVNASLQCLTYTPPLANYMLSREHSQTCHRHKGCMLCTMQAHITRALHNPGHVIQPSQALAAGFHRGKQEDAHEFLMFTVDAMKKACLPGHKQVDHHSKDTTLIHQIFGGYWRSQIKCLHCHGISDTFDPYLDIALDIQAAQSVQQALEQLVKPEELNGENAYHCGVCLQRAPASKTLTLHTSAKVLILVLKRFSDVTGNKIAKNVQYPECLDMQPYMSQPNTGPLVYVLYAVLVHAGWSCHNGHYFSYVKAQEGQWYKMDDAEVTASSITSVLSQQAYVLFYIQKS

SEQ ID NO: 170 - protein, 537 aa, Homo sapiens
FGPGYTGIRNLGNSCYLNSVVQVLFSIPDFQRKYVDKLEKIFQNAPTDPTQDFSTQVAKLGHGLLSGEYSKPVPESGDGERVPEQKEVQDGIAPRMFKALIGKGHPEFSTNRQQDAQEFFLHLINMVERNCRSSENPNEVFRFLVEEKIKCLATEKVKYTQRVDYIMQLPVPMDAALNKEELLEYEEKKRQAEEEKMALPELVRAQVPFSSCLEAYGAPEQVDDFWSTALQAKSVAVKTTRFASFPDYLVIQIKKFTFGLDWVPKKLDVSIEMPEELDISQLRGTGLQPGEEELPDIAPPLVTPDEPKGSLGFYGNEDEDSFCSPHFSSPTSPMLDESVIIQLVEMGFPMDACRKAVYYTGNSGAEAAMNWVMSHMDDPDFANPLILPGSSGPGSTSAAADPPPEDCVTTIVSMGFSRDQALKALRATNNSLERAVDWIFSHIDDLDAEAAMDISEGRSAADSISESVPVGPKVRDGPGKYQLFAFISHMGTSTMCGHYVCHIKKEGRWVIYNDQKVCASEKPPKDLGYIYFYQRVA

SEQ ID NO: 171 - protein, 536 aa, Homo sapiens
ARGLTGLKNIGNTCYMNAALQALSNCPPLTQFFLDCGGLARTDKKPAICKSYLKLMTELWHKSRPGSVVPTTLFQGIKTVNPTFRGYSQQDAQEFLRCLMDLLHEELKEQVMEVEEDPQTITTEETMEEDKSQSDVDFQSCESCSNSDRAENENGSRCFSEDNNETTMLIQDDENNSEMSKDWQKEKMCNKINKVNSEGEFDKDRDSISETVDLNNQETVKVQIHSRASEYITDVHSNDLSTPQILPSNEGVNPRLSASPPKSGNLWPGLAPPHKKAQSASPKRKKQHKKYRSVISDIFDGTIISSVQCLTCDRVSVTLETFQDLSLPIPGKEDLAKLHSSSHPTSIVKAGSCGEAYAPQGWIAFFMEYVKRFVVSCVPSWFWGPVVTLQDCLAAFFARDELKGDNMYSCEKCKKLRNGVKFCKVQNFPEILCIHLKRFRHELMFSTKISTHVSFPLEGLDLQPFLAKDSPAQIVTYDLLSVICHHGTASSGHYIAYCRNNLNNLWYEFDDQSVTEVSESTVQNAEAYVLFYRKSS

SEQ ID NO: 172 - protein, 353 aa, Homo sapiens
LGSGHVGLRNLGNTCFLNAVLQCLSSTRPLRDFCLRRDFRQEVPGGGRAQELTEAFADVIGALWHPDSCEAVNPTRFRAVFQKYVPSFSGYSQQDAQEFLKLLMERLHLEINRRGRRAPPILANGPVPSPPRRGGALLEEPELSDDDRANLMWKRYLEREDSKIVDLFVGQLKSCLKCQACGYRSTTFEVFCDLSLPIPKKGFAGGKVSLRDCFNLFTKEEELESENAPVCDRCRQKTRSTKKLTVQRFPRILVLHLNRFSASRGSIKKSSVGVDFPLQRLSLGDFASDKAGSPVYQLYALCNHSGSVHYGHYTALCRCQTGWHVYNDSRVSPVSENQVASSEGYVLFYQLMQ

SEQ ID NO: 173 - protein, 300 aa, Homo sapiens
AVGAGLQNMGNTCYENASLQCLTYTLPLANYMLSREHSQTCQRPKCCMLCTMQAHITWALHSPGHVIQPSQALAAGFHRGKQEDVHEFLMFTVDAMKKACLPGHKQVDHHSKDTTLIHQIFGGCWRSQIKCLHCHGISDTFDPYLDIALDIQAAQSVKQALEQLVKPEELNGENAYHCGLCLQRAPASNTLTLHTSAKVLILVLKRFSDVAGNKLAKNVQYPECLDMQPYMSQQNTGPLVYVLYAVLVHAGWSCHDGYYFSYVKAQEGQWYKMDDAEVTVCSITSVLSQQAYVLFYIQKS

SEQ ID NO: 174 - protein, 300 aa, Homo sapiens; identical to SEQ ID NO: 169

SEQ ID NO: 175 - protein, 334 aa, Homo sapiens
EHYFGLVNFGNTCYCNSVLQALYFCRPFREKVLAYKSQPRKKESLLTCLADLFHSIATQKKKVGVIPPKKFITRLRKENELFDNYMQQDAHEFLNYLLNTIADILQEERKQEKQNGRLPNGNIDNENNNSTPDPTWVHEIFQGTLTNETRCLTCETISSKDEDFLDLSVDVEQNTSITHCLRGFSNTETLCSEYKYYCEECRSKQEAHKRMKVKKLPMILALHLKRFKYMDQLHRYTKLSYRVVFPLELRLFNTSGDATNPDRMYDLVAVVVHCGSGPNRGHYIAIVKSHDFWLLFDDDIVEKIDAQAIEEFYGLTSDISKNSESGYILFYQSR

SEQ ID NO: 176 - protein, 300 aa, Homo sapiens
AVGAGLQNMGNTCYVNASLQCLTYTPPLANYMLSREHSQTCHRHKGCMLCTMQAHITRALHNPGHVIQPSQALAAGFHRGKQEDAHEFLMFTVDAMKKACLPGHKQVDHHSKDTTLIHQIFGGYWRSQIKCLHCHGISDTFDPYLDIALDIQAAQSVQQALEQLVKPEELNGENAYHCGVCLQRAPASKMLTLLTSAKVLILVLKRFSDVTGNKIAKNVQYPECLDMQPYMSQPNTGPLVYVLYAVLVHAGWSCHNGHYFSYVKAQEGQWYKMDDAEVTASSITSVLSQQAYVLFYIQKS

SEQ ID NO: 177 - protein, 546 aa, Homo sapiens
PRGLTGMKNLGNSCYMNAALQALSNCPPLTQFFLECGGLVRTDKKPALCKSYQKLVSEVWHKKRPSYVVPTSLSHGIKLVNPMFRGYAQQDTQEFLRCLMDQLHEELKEPVVATVALTEARDSDSSDTDEKREGDRSPSEDEFLSCDSSSDRGEGDGQGRGGGSSQAETELLIPDEAGRAISEKERMKDRKFSWGQQRTNSEQVDEDADVDTAMAALDDQPAEAQPPSPRSSSPCRTPEPDNDAHLRSSSRPCSPVHHHEGHAKLSSSPPRASPVRMAPSYVLKKAQVLSAGSRRRKEQRYRSVISDIFDGSILSLVQCLTCDRVSTTVETFQDLSLPIPGKEDLAKLHSAIYQNVPAKPGACGDSYAAQGWLAFIVEYIRRFVVSCTPSWFWGPVVTLEDCLAAFFAADELKGDNMYSCERCKKLRNGVKYCKVLRLPEILCIHLKRFRHEVMYSFKINSHVSFPLEGLDLRPFLAKECTSQITTYDLLSVICHHGTAGSGHYIAYCQNVINGQWYEFDDQYVTEVHETVVQNAEGYVLFYRKSS

SEQ ID NO: 178 - protein, 334 aa, Homo sapiens
EHYFGLVNFGNTCYCNSVLQALYFCRPFRENVLAYKAQQKKKENLLTCLADLFHSIATQKKKVGVIPPKKFISRLRKENDLFDNYMQQDAHEFLNYLLNTIADILQEEKKQEKQNGKLKNGNMNEPAENNKPELTWVHEIFQGTLTNETRCLNCETVSSKDEDFLDLSVDVEQNTSITHCLRDFSNTETLCSEQKYYCETCCSKQEAQKRMRVKKLPMILALHLKRFKYMEQLHRYTKLSYRVVFPLELRLFNTSSDAVNLDRMYDLVAVVVHCGSGPNRGHYITIVKSHGFWLLFDDDIVEKIDAQAIEEFYGLTSDISKNSESGYILFYQSR

SEQ ID NO: 179 - protein, 363 aa, Homo sapiens
GKKKGIQGHYNSCYLDSTLFCLFAFSSVLDTVLLRPKEKNDVEYYSETQELLRTEIVNPLRIYGYVCATKIMKLRKILEKVEAASGFTSEEKDPEEFLNILFHHILRVEPLLKIRSAGQKVQDCYFYQIFMEKNEKVGVPTIQQLLEWSFINSNLKFAEAPSCLIIQMPRFGKDFKLFKKIFPSLELNITDLLEDTPRQCRICGGLAMYECRECYDDPDISAGKIKQFCKTCNTQVHLHPKRLNHKYNPVSLPKDLPDWDWRHGCIPCQNMELFAVLCIETSHYVAFVKYGKDDSAWLFFDSMADRDGGQNGFNIPQVTPCPEVGEYLKMSLEDLHSLDSRRIQGCARRLLCDAYMCMYQSPT

SEQ ID NO: 180 - protein, 631 aa, Homo sapiens
ITVKGLSNLGNTCFFNAVMQNLSQTPVLRELLKEVKMSGTIVKIEPPDLALTEPLEINLEPPGPLTLAMSQFLNEMQETKKGVVTPKELFSQVCKKAVRFKGYQQQDSQELLRYLLDGMRAEEHQRVSKGILKAFGNSTEKLDEELKNKVKDYEKKKSMPSFVDRIFGGELTSMIMCDQCRTVSLVHESFLDLSLPVLDDQSGKKSVNDKNLKKTVEDEDQDSEEEKDNDSYIKERSDIPSGTSKHLQKKAKKQAKKQAKNQRRQQKIQGKVLHLNDICTIDHPEDSEYEAEMSLQGEVNIKSNHISQEGVMHKEYCVNQKDLNGQAKMIESVTDNQKSTEEVDMKNINMDNDLEVLTSSPTRNLNGAYLTEGSNGEVDISNGFKNLNLNAALHPDEINIEILNDSHTPGTKVYEVVNEDPETAFCTLANREVFNTDECSIQHCLYQFTRNEKLRDANKLLCEVCTRRQCNGPKANIKGERKHVYTNAKKQMLISLAPPVLTLHLKRFQQAGFNLRKVNKHIKFPEILDLAPFCTLKCKNVAEENTRVLYSLYGVVEHSGTMRSGHYTAYAKARTANSHLSNLVLHGDIPQDFEMESKGQWFHISDTHVQAVPTTKVLNSQAYLLFYERIL

SEQ ID NO: 181 - protein, 291 aa, Homo sapiens
YRYKDSLKEDIQKADLVISHAGAGSCLETLEKGKPLVVVINEKLMNNHQLELAKQLHKEGHLFYCTCRVLTCPGQAKSIASAPGKCQDSAALTSTAFSGLDFGLLSGYLHKQALVTATHPTCTLLFPSCHAFFPLPLTPTLYKMHKGWKNYCSQKSLNEASMDEYLGSLGLFRKLTAKDASCLFRAISEQLFCSQVHHLEIRKACVSYMRENQQTFESYVEGSFEKYLERLGDPKESAGQLEIRALSLIYNRDFILYRFPGKPPTYVTDNGYEDKILLCYSSSGHYDSVYS

SEQ ID NO: 182 - protein, 212 aa, Homo sapiens
QGLSSRTRVRELQGQIAAITGIAPGGQRILVGYPPECLDLSNGDTILEDLPIQSGDMLIIEEDQTRPRSSPAFTKRGASSYVRETLPVLTRTVVPADNSCLFTSVYYVVEGGVLNPACAPEMRRLIAQIVASDPDFYSEAILGKTNQEYCDWIKRDDTWGGAIEISILSKFYQCEICVVDTQTVRIDRFGEDAGYTKRVLLIYDGIHYDPLQ

SEQ ID NO: 183 - protein, 375 aa, Homo sapiens
HREAAAVPAAKMPAFSSCFEVVSGAAAPASAAAGPPGASCKPPLPPHYTSTAQITVRALGADRLLLHGPDPVPGAAGSAAAPRGRCLLLAPAPAAPVPPRRGSSAWLLEELLRPDCPEPAGLDATREGPDRNFRLSEHRQALAAAKHRGPAATPGSPDPGPGPWGEEHLAERGPRGWERGGDRCDAPGGDAARRPDPEAEAPPAGSIEAAPSSAAEPVIVSRSDPRDEKLALYLAEVEKQDKYLRQRNKYRFHIIPDGNCLYRAVSKTVYGDQSLHRELREQTVHYIADHLDHFSPLIEGDVGEFIIAAAQDGAWAGYPELLAMGQMLNVNIHLTTGGRLESPTVSTMIHYLGPEDSLRPSIWLSWLSNGHYDAV

SEQ ID NO: 184 - protein, 213 aa, Homo sapiens
QKHREELEQLKLTTKENKIDSVAVNISNLVLENQPPRISKAQKRREKKAALEKEREERIAEAEIENLTGARHMESEKLAQILAARQLEIKQIPSDGHCMYKAIEDQLKEKDCALTVVALRSQTAEYMQSHVEDFLPFLTNPNTGDMYTPEEFQKYCEDIVNTAAWGGQLELRALSHILQTPIEIIQADSPPIIVGEEYSKKPLILVYMRHAYG

SEQ ID NO: 185 - protein, 204 aa, Homo sapiens
QELEKFQDDSSIESVVEDLAKMNLENRPPRSSKAHRKRERMESEERERQESIFQAEMSEHLAGFKREEEEKLAAILGARGLEMKAIPADGHCMYRAIQDQLVFSVSVEMLRCRTASYMKKHVDEFLPFFSNPETSDSFGYDDFMIYCDNIVRTTAWGGQLELRALSHVLKTPIEVIQADSPTLIIGEEYVKKPIILVYLRYAYS

SEQ ID NO: 186 - protein, 311 aa, Homo sapiens
SDYEQLRQVHTANLPHVFNEGRGPKQPEREPQPGHKVERPCLQRQDDIAQEKRLSRGISHASSAIVSLARSHVASECNNEQFPLEMPIYTFQLPDLSVYSEDFRSFIERDLIEQATMVALEQAGRLNWWSTVCTSCKRLLPLATTGDGNCLLHAASLGMWGFHDRDLVLRKALYTMMRTGAEREALKRRWRWQQTQQNKEEEWEREWTELLKLASSEPRTHFSKNGGTGGGVDNSEDPVYESLEEFHVFVLAHILRRPIVVVADTMLRDSGGEAFAPIPFGGIYLPLEVPPNRCHCSPLVLAYDQAHFSAL

SEQ ID NO: 187 - protein, 154 aa, Homo sapiens
MEAAVGVPDGGDQGGAGPREDATPMDAYLRKLGLYRKLVAKDGSCLFRAVAEQVLHSQSRHVEVRMACIHYLRENREKFEAFIEGSFEEYLKRLENPQEWVGQVEISALSLMYRKDFIIYREPNVSPSQVTENNFPEKVLLCFSNGNHYDIVYP

SEQ ID NO: 188 - protein, 188 aa, Homo sapiens
MSRKQAAKSRPGSGSRKAEAERKRDERAARRALAKERRNRPESGGGGGCEEEFVSFANQLQALGLKLREVPGDGNCLFRALGDQLEGHSRNHLKHRQETVDYMIKQREDFEPFVEDDIPFEKHVASLAKPGTFAGNDAIVAFARNHQLNVVIHQLNAPLWQIRGTEKSSVRELHIAYRYGEHYDSVRR

SEQ ID NO: 189 - protein, 362 aa, Homo sapiens
MTLDMDAVLSDFVRSTGAEPGLARDLLEGKNWDVNAALSDFEQLRQVHAGNLPPSFSEGSGGSRTPEKGFSDREPTRPPRPILQRQDDIVQEKRLSRGISHASSSIVSLARSHVSSNGGGGGSNEHPLEMPICAFQLPDLTVYNEDFRSFIERDLIEQSMLVALEQAGRLNWWVSVDPTSQRLLPLATTGDGNCLLHAASLGMWGFHDRDLMLRKALYALMEKGVEKEALKRRWRWQQTQQNKESGLVYTEDEWQKEWNELIKLASSEPRMHLGTNGANCGGVESSEEPVYESLEEFHVFVLAHVLRRPIVVVADTMLRDSGGEAFAPIPFGGIYLPLEVPASQCHRSPLVLAYDQAHFSAL

SEQ ID NO: 190 - protein, 338 aa, Homo sapiens
MTILPKKKPPPPDADPANEPPPPGPMPPAPRRGGGVGVGGGGTGVGGGDRDRDSGVVGARPRASPPPQGPLPGPPGALHRWALAVPPGAVAGPRPQQASPPPCGGPGGPGGGPGDALGAAAAGVGAAGVVVGVGGAVGVGGCCSGPGHSKRRRQAPGVGAVGGGSPEREEVGAGYNSEDEYEAAAARIEAMDPATVEQQEHWFEKALRDKKGFIIKQMKEDGACLFRAVADQVYGDQDMHEVVRKHCMDYLMKNADYFSNYVTEDFTTYINRKRKNNCHGNHIEMQAMAEMYNRPVEVYQYSTGTSAVEPINTFHGIHQNEDEPIRVSYHRNIHYNSV

SEQ ID NO: 191 - protein, 260 aa, Homo sapiens
MAEQVLPQALYLSNMRKAVKIRERTPEDIFKPTNGIIHHFKTMHRYTLEMFRTCQFCPQFREIIHKALIDRNIQATLESQKKLNWCREVRKLVALKTNGDGNCLMHATSQYMWGVQDTDLVLRKALFSTLKETDTRNFKFRWQLESLKSQEFVETGLCYDTRNWNDEWDNLIKMASTDTPMARSGLQYNSLEEIHIFVLCNILRRPIIVISDKMLRSLESGSNFAPLKVGGIYLPLHWPAQECYRYPIVLGYDSHHFVPL

SEQ ID NO: 192 - protein, 589 aa, Homo sapiens
MSERGIKWACEYCTYENWPSAIKCTMCRAQRPSGTIITEDPFKSGSSDVGRDWDPSSTEGGSSPLICPDSSARPRVKSSYSMENANKWSCHMCTYLNWPRAIRCTQCLSQRRTRSPTESPQSSGSGSRPVAFSVDPCEEYNDRNKLNTRTQHWTCSVCTYENWAKAKRCVVCDHPRPNNIEAIELAETEEASSIINEQDRARWRGSCSSGNSQRRSPPATKRDSEVKMDFQRIELAGAVGSKEELEVDFKKLKQIKNRMKKTDWLFLNACVGVVEGDLAAIEAYKSSGGDIARQLTADEVRLLNRPSAFDVGYTLVHLAIRFQRQDMLAILLTEVSQQAAKCIPAMVCPELTEQIRREIAASLHQRKGDFACYFLTDLVTFTLPADIEDLPPTVQEKLFDEVLDRDVQKELEEESPIINWSLELATRLDSRLYALWNRTAGDCLLDSVLQATWGIYDKDSVLRKALHDSLHDCSHWFYTRWKDWESWYSQSFGLHFSLREEQWQEDWAFILSLASQPGASLEQTHIFVLAHILRRPIIVYGVKYYKSFRGETLGYTRFQGVYLPLLWEQSFCWKSPIALGYTRGHFSAL

SEQ ID NO: 193 - protein, 298 aa, Homo sapiens
PASGSVSIECTECGQRHEQQQLLGVEEVTDPDVVLHNLLRNALLGVTGAPKKNTELVKVMGLSNYHCKLLSPILARYGMDKQTGRAKLLRDMNQGELFDCALLGDRAFLIEPEHVNTVGYGKDRSGSLLYLHDTLEDIKRANKSQECLIPVHVDGDGHCLVHAVSRALVGRELFWHALRENLKQHFQQHLARYQALFHDFIDAAEWEDIINECDPLFVPPEGVPLGLRNIHIFGLANVLHRPIILLDSLSGMRSSGDYSATFLPGLIPAEKCTGKDGHLNKPICIAWSSSGRNHYIPL

SEQ ID NO: 194 - protein, 227 aa, Homo sapiens
QRWLPLEANPEVTNQFLKQLGLHPNWQFVDVYGMDPELLSMVPRPVCAVLLLFPITEKYEVFRTEEEEKIKSQGQDVTSSVYFMKQTISNACGTIGLIHAIANNKDKMHFESGSTLKKFLEESVSMSPEERARYLENYDAIRVTHETSAHEGQTEAPSIDEKVDLHFIALVHVDGHLYELDGRKPFPINHGETSDETLLEDAIEVCKKFMERDPDELRFNAIALSAA

SEQ ID NO: 195 - protein, 223 aa, Homo sapiens
GEWCLMESDPGVFTELIKGFGCRGAQVEEIWSLEPENFEKLKPVHGLIFLFKWQPGEEPAGSVVQDSRLDTIFFAKQVINNACATQAIVSVLLNCTHQDVHLGETLSEFKEFSQSFDAAMKGLALSNSDVIRQVHNSFARQQMFEFDTKTSAKEEDAFHFVSYVPVNGRLYELDGLREGPIDLGACNQDDWISAVRPVIEKRIQKYSEGEIRFNLMAIVSDRK

SEQ ID NO: 196 - protein, 165 aa, Homo sapiens
ESIFHEKQEGSLCAQHCLNNLLQGEYFSPVELSSIAHQLDEEERMRMAEGGVTSEDYRTFLQQPSGNMDDSGFFSIQVISNALKVWGLELILFNSPEYQRLRIDPINERSFICNYKEHWFTVRKLGKQWFNLNSLLTGPELISDTYLALFLAQLQQEGYSIFVVK

SEQ ID NO: 197 - protein, 163 aa, Homo sapiens
PTVYHERQRLELCAVHALNNVLQQQLFSQEAADEICKRLAPDSRLNPHRSLLGTGNYDVNVIMAALQGLGLAAVWWDRRRPLSQLALPQVLGLILNLPSPVSLGLLSLPLRRRHWVALRQVDGVYYNLDSKLRAPEALGDEDGVRAFLAAALAQGLCEVLLVV

SEQ ID NO: 198 - protein, 170 aa, Homo sapiens
PQAAPPQIYHEKQRRELCALHALNNVFQDSNAFTRDTLQEIFQRLSPNTMVTPHKKSMLGNGNYDVNVIMAALQTKGYEAVWWDKRRDVGVIALTNVMGFIMNLPSSLCWGPLKLPLKRQHWICVREVGGAYYNLDSKLKMPEWIGGESELRKFLKHHLRGKNCELLLVV

SEQ ID NO: 199 - protein, 165 aa, Homo sapiens
DFIFHEKQEGFLCAQHCLNNLLQGEYFSPVELASIAHQLDEEERMRMAEGGVTSEEYLAFLQQPSENMDDTGFFSIQVISNALKFWGLEIIHFNNPEYQKLGIDPINERSFICNYKQHWFTIRKFGKHWFNLNSLLAGPELISDTCLANFLARLQQQAYSVFVVK

SEQ ID NO: 200 - protein, 419 aa, Homo sapiens
CRWTQGFVFSESEGSALEQFEGGPCAVIAPVQAFLLKKLLFSSEKSSWRDCSEEEQKELLCHTLCDILESACCDHSGSYCLVSWLRGKTTEETASISGSPAESSCQVEHSSALAVEELGFERFHALIQKRSFRSLPELKDAVLDQYSMWGNKFGVLLFLYSVLLTKGIENIKNEIEDASEPLIDPVYGHGSQSLINLLLTGHAVSNVWDGDRECSGMKLLGIHEQAAVGFLTLMEALRYCKVGSYLKSPKFPIWIVGSETHLTVFFAKDMALVAPEAPSEQARRVFQTYDPEDNGFIPDSLLEDVMKALDLVSDPEYINLMKNKLDPEGLGIILLGPFLQEFFPDQGSSGPESFTVYHYNGLKQSNYNEKVMYVEGTAVVMGFEDPMLQTDDTPIKRCLQTKWPYIELLWTTDRSPSLN

SEQ ID NO: 201 - protein, 356 aa, Homo sapiens
YCVKWIPWKGEQTPIITQSTNGPCPLLAIMNILFLQWKVKLPPQKEVITSDELMAHLGNCLLSIKPQEKSEGLQLNFQQNVDDAMTVLPKLATGLDVNVRFTGVSDFEYTPECSVFDLLGIPLYHGWLVDPQSPEAVRAVGKLSYNQLVERIITCKHSSDTNLVTEGLIAEQFLETTAAQLTYHGLCELTAAAKEGELSVFFRNNHFSTMTKHKSHLYLLVTDQGFLQEEQVVWESLHNVDGDSCFCDSDFHLSHSLGKGPGAEGGSGSPETQLQVDQDYLIALSLQQQQPRGPLGLTDLELAQQLQQEEYQQQQAAQPVRMRTRVLSLQGRGATSGRPAGERRQRPKHESDCILL

SEQ ID NO: 202 - protein, 379 aa, Homo sapiens
YHIKWIQWKEENTPIITQNENGPCPLLAILNVLLLAWKVKLPPMMEIITAEQLMEYLGDYMLDAKPKEISEIQRLNYEQNMSDAMAILHKLQTGLDVNVRFTGVRVFEYTPECIVFDLLDIPLYHGWLVDPQIDDIVKAVGNCSYNQLVEKIISCKQSDNSELVSEGFVAEQFLNNTATQLTYHGLCELTSTVQEGELCVFFRNNHFSTMTKYKGQLYLLVTDQGFLTEEKVVWESLHNVDGDGNFCDSEFHLRPPSDPETVYKGQQDQIDQDYLMALSLQQEQQSQEINWEQIPEGISDLELAKKLQEEEDRRASQYYQEQEQAAAAAAAASTQAQQGQPAQASPSSGRQSGNSERKRKEPREKDKEKEKEKNSCVIL

SEQ ID NO: 203 - protein, 334 aa, Homo sapiens
FCCFNEEWKLQSFSFSNTASLKYGIVQNKGGPCGVLAAVQGCVLQKLLFEGDSKADCAQGLQPSDAHRTRCLVLALADIVWRAGGRERAVVALASRTQQFSPTGKYKADGVLETLTLHSLTCYEDLVTFLQQSIHQFEVGPYGCILLTLSAILSRSTELIRQDFDVPTSHLIGAHGYCTQELVNLLLTGKAVSNVFNDVVELDSGDGNITLLRGIAARSDIGFLSLFEHYNMCQVGCFLKTPRFPIWVVCSESHFSILFSLQPGLLRDWRTERLFDLYYYDGLANQQEQIRLTIDTTQTISEDTDNDLVPPLELCIRTKWKGASVNWNGSDPIL

SEQ ID NO: 204 - protein, 167 aa, Homo sapiens
VVPGRLCPQFLQLASANTARGVETCGILCGKLMRNEFTITHVLIPKQSAGSDYCNTENEEELFLIQDQQGLITLGWIHTHPTQTAFLSSVDLHTHCSYQMMLPESVAIVCSPKFQETGFFKLTDHGLEEISSCRQKGFHPHSKDPPLFCSCSHVTVVDRAVTITDLR

SEQ ID NO: 205 - protein, 200 aa, Homo sapiens
VAVSSNVLFLLDFHSHLTRSEVVGYLGGRWDVNSQMLTVLRAFPCRSRLGDAETAAAIEEEIYQSLFLRGLSLVGWYHSHPHSPALPSLQDIDAQMDYQLRLQGSSNGFQPCLALLCSPYYSGNPGPESKISPFWVMPPPEMLLVEFYKGSPDLVRLQEPWSQEHTYLDKLKISLASRTPKDQSLCHVLEQVCGVLKQGS

SEQ ID NO: 206 - protein, 201 aa, Homo sapiens
ALAYVKMCLHAARYPHAAVNGLFLAPAPRSGECLCLTDCVPLFHSHLALSVMLEVALNQVDVWGAQAGLVVAGYYHANAAVNDQSPGPLALKIAGRIAEFFPDAVLIMLDNQKLVPQPRVPPVIVLENQGLRWVPKDKNLVMWRDWEESRQMVGALLEDRAHQHLVDFDCHLDDIRQDWTNQRLNTQITQWVGPTNGNGNA

SEQ ID NO: 207 - protein, 281 aa, Homo sapiens
QVYISSLALLKMLKHGRAGVPMEVMGLMLGEFVDDYTVRVIDVFAMPQSGTGVSVEAVDPVFQAKMLDMLKQTGRPEMVVGWYHSHPGFGCWLSGVDINTQQSFEALSERAVAVVVDPIQSVKGKVVIDAFRLINANMMVLGHEPRQTTSNLGHLNKPSIQALIHGLNRHYYSITINYRKNELEQKMLLNLHKKSWMEGLTLQDYSEHCKHNESVVKEMLELAKNYNKAVEEEDKMTPEQLAIKNVGKQDPKRHLEEHVDVLMTSNIVQCLAAMLDTVVFK

SEQ ID NO: 208 - protein, 253 aa, Homo sapiens
QVKVASEALLIMDLHAHVSMAEVIGLLGGRYSEVDKVVEVCAAEPCNSLSTGLQCEMDPVSQTQASETLAVRGFSVIGWYHSHPAFDPNPSLRDIDTQAKYQSYFSRGGAKFIGMIVSPYNRNNPLPYSQITCLVISEEISPDGSYRLPYKFEVQQMLEEPQWGLVFEKTRWIIEKYRLSHSSVPMDKIFRRDSDLTCLQKLLECMRKTLSKVTNCFMAEEFLTEIENLFLSNYKSNQENGVTEENCTKELLM

SEQ ID NO: 209 - protein, 404 aa, Homo sapiens
AVCFHSANSNADHEGFLLGEVRQEETFSISDSQISNTEFLQVIEIHNHQPCSKLFSFYDYASKVNEESLDRILKDRRKKVIGWYRFRRNTQQQMSYREQVLHKQLTRILGVPDLVFLLFSFISTANNSTHALEYVLFRPNRRYNQRISLAIPNLGNTSQQEYKVSSVPNTSQSYAKVIKEHGTDFFDKDGVMKDIRAIYQVYNALQEKVQAVCADVEKSERVVESCQAEVNKLRRQITQRKNEKEQERRLQQAVLSRQMPSESLDPAFSPRMPSSGFAAEGRSTLGDAEASDPPPPYSDFHPNNQESTLSHSRMERSVFMPRPQAVGSSNYASTSAGLKYPGSGADLPPPQRAAGDSGEDSDDSDYENLIDPTEPSNSEYSHSKDSRPMAHPDEDPRNTQTSQI

SEQ ID NO: 210 - protein, 526 aa, Homo sapiens
FNPRTGQLFLKIIHTSVWAGQKRLGQLAKWKTAEEVAALIRSLPVEEQPKQIIVTRKGMLDPLEVHLLDFPNIVIKGSELQLPFQACLKVEKFGDLILKATEPQMVLFNLYDDWLKTISSYTAFSRLILILRALHVNNDRAKVILKPDKTTITEPHHIWPTLTDEEWIKVEVQLKDLILADYGKKNNVNVASLTQSEIRDIILGMEISAPSQQRQQIAEIEKQTKEQSQLTATQTRTVNKHGDEIITSTTSNYETQTFSSKTEWRVRAISAANLHLRTNHIYVSSDDIKETGYTYILPKNVLKKFICISDLRAQIAGYLYGVSPPDNPQVKEIRCIVMVPQWGTHQTVHLPGQLPQHEYLKEMEPLGWIHTQPNESPQLSPQDVTTHAKIMADNPSWDGEKTIIITCSFTPGSCTLTAYKLTPSGYEWGRQNTDKGNNPKGYLPSHYERVQMLLSDRFLGFFMVPAQSSWNYNFMGVRHDPNMKYELQLANPKEFYHEVHRPSHFLNFALLQEGEVYSADREDLYA

SEQ ID NO: 211 - protein, 400 aa, Homo sapiens
QPSAITLNRQKYRHVDNIMFENHTVADRFLDFWRKTGNQHFGYLYGRYTEHKDIPLGIRAEVAAIYEPPQIGTQNSLELLEDPKAEVVDEIAAKLGLRKVGWIFTDLVSEDTRKGTVRYSRNKDTYFLSSEECITAGDFQNKHPNMCRLSPDGHFGSKFVTAVATGGPDNQVHFEGYQVSNQCMALVRDECLLPCKDAPELGYAKESSSEQYVPDVFYKDVDKFGNEITQLARPLPVEYLIIDITTTFPKDPVYTFSISQNPFPIENRDVLGETQDFHSLATYLSQNTSSVFLDTISDFHLLLFLVTNEVMPLQDSISLLLEAVRTRNEELAQTWKRSEQWATIEQLCSTVGGQLPGLHEYGAVGGSTHTATAAMWACQHCTFMNQPGTGHCEMCSLPRT

SEQ ID NO: 212 - protein, 203 aa, Homo sapiens
TQAYCKMVLHGAKYPHCAVNGLLVAEKQKPRKEHLPLGGPGAHHTLFVDCIPLFHGTLALAPMLEVALTLIDSWCKDHSYVIAGYYQANERVKDASPNQVAEKVASRIAEGFSDTALIMVDNTKFTMDCVAPTIHVYEHHENRWRCRDPHHDYCEDWPEAQRISASLLDSRSYETLVDFDNHLDDIRNDWTNPEINKAVLHLC

SEQ ID NO: 213 - protein, 398 aa, Homo sapiens
GFVLGALAFQHLNTDSDTEGFLLGEVKGEAKNSITDSQMDDVEVVYTIDIQKYIPCYQLFSFYNSSGEVNEQALKKILSNVKKNVVGWYKFRRHSDQIMTFRERLLHKNLQEHFSNQDLVFLLLTPSIITESCSTHRLEHSLYKPQKGLFHRVPLVVANLGMSEQLGYKTVSGSCMSTGFSRAVQTHSSKFFEEDGSLKEVHKINEMYASLQEELKSICKKVEDSEQAVDKLVKDVNRLKREIEKRRGAQIQAAREKNIQKDPQENIFLCQALRTFFPNSEFLHSCVMSLKNRHVSKSSCNYNHHLDVVDNLTLMVEHTDIPEASPASTPQIIKHKALDLDDRWQFKRSRLLDTQDKRSKADTGSSNQDKASKMSSPETDEEIEKMKGFGEYSRSPTF

SEQ ID NO: 214 - protein, 168 aa, Homo sapiens
VVLPEDLCHKFLQLAESNTVRGIETCGILCGKLTHNEFTITHVIVPKQSAGPDYCDMENVEELFNVQDQHDLLTLGWIHTHPTQTAFLSSVDLHTHCSYQLMLPEAIAIVCSPKHKDTGIFRLTNAGMLEVSACKKKGFHPHTKEPRLFSICKHVLVKDIKIIVLDLR

SEQ ID NO: 215 - protein, 287 aa, Homo sapiens
VALHPLVILNISDHWIRMRSQEGRPVQVIGALIGKQEGRNIEVMNSFELLSHTVEEKIIIDKEYYYTKEEQFKQVFKELEFLGWYTTGGPPDPSDIHVHKQVCEIIESPLFLKLNPMTKHTDLPVSVFESVIDIINGEATMLFAELTYTLATEEAERIGVDHVARMTATGSGENSTVAEHLIAQHSAIKMLHSRVKLILEYVKASEAGEVPFNHEILREAYALCHCLPVLSTDKFKTDFYDQCNDVGLMAYLGTITKTCNTMNQFVNKFNVLYDRQGIGRRMRGLFF

SEQ ID NO: 216 - protein, 266 aa, Homo sapiens
VRLHPVILASIVDSYERRNEGAARVIGTLLGTVDKHSVEVTNCFSVPHNESEDEVAVDMEFAKNMYELHKKVSPNELILGWYATGHDITEHSVLIHEYYSREAPNPIHLTVDTSLQNGRMSIKAYVSTLMGVPGRTMGVMFTPLTVKYAYYDTERIGVDLIMKTCFSPNRVIGLSSDLQQVGGASARIQDALSTVLQYAEDVLSGKVSADNTVGRFLMSLVNQVPKIVPDDFETMLNSNINDLLMVTYLANLTQSQIALNEKLVNL

SEQ ID NO: 217 - protein, 316 aa, Homo sapiens
VVVHPLVLLSVVDHFNRIGKVGNQKRVVGVLLGSWQKKVLDVSNSFAVPFDEDDKDDSVWFLDHDYLENMYGMFKKVNARERIVGWYHTGPKLHKNDIAINELMKRYCPNSVLVIIDVKPKDLGLPTEAYISVEEVHDDGTPTSKTFEHVTSEIGAEEAEEVGVEHLLRDIKDTTVGTLSQRITNQVHGLKGLNSKLLDIRSYLEKVATGKLPINHQIIYQLQDVFNLLPDVSLQEFVKAFYLKTNDQMVVVYLASLIRSVVALHNLINNKIANRDAEKKEGQEKEESKKDRKEDKEKDKDKEKSDVKKEEKKEKK

SEQ ID NO: 218 - protein, 314 aa, Homo sapiens
VQIDGLVVLKIIKHYQEEGQGTEVVQGVLLGLVVEDRLEITNCFPFPQHTEDDADFDEVQYQMEMMRSLRHVNIDHLHVGWYQSTYYGSFVTRALLDSQFSYQHAIEESVVLIYDPIKTAQGSLSLKAYRLTPKLMEVCKEKDFSPEALKKANITFEYMFEEVPIVIKNSHLINVLMWELEKKSAVADKHELLSLASSNHLGKNLQLLMDRVDEMSQDIVKYNTYMRNTSKQQQQKHQYQQRRQQENMQRQSRGEPPLPEEDLSKLFKPPQPPARMDSLLIAGQINTYCQNIKEFTAQNLGKLFMAQALQEYNN

SEQ ID NO: 219 - protein, 281 aa, Homo sapiens
YCKISALALLKMVMHARSGGNLEVMGLMLGKVDGETMIIMDSFALPVEGTETRVNAQAAAYEYMAAYIENAKQVGRLENAIGWYHSHPGYGCWLSGIDVSTQMLNQQFQEPFVAVVIDPTRTISAGKVNLGAFRTYPKGYKPPDEGPSEYQTIPLNKIEDFGVHCKQYYALEVSYFKSSLDRKLLELLWNKYWVNTLSSSSLLTNADYTTGQVFDLSEKLEQSEAQLGRGSFMLGLETHDRKSEDKLAKATRDSCKTTIEAIHGLMSQVIKDKLFNQINIS

SEQ ID NO: 220 - protein, 305 aa, Homo sapiens
VHLESDAFLVCLNHALSTEKEEVMGLCIGELNDDTRSDSKFAYTGTEMRTVAEKVDAVRIVHIHSVIILRRSDKRKDRVEISPEQLSAASTEAERLAELTGRPMRVVGWYHSHPHITVWPSHVDVRTQAMYQMMDQGFVGLIFSCFIEDKNTKTGRVLYTCFQSIQAQKSSESLHGPRDFWSSSQHISIEGQKEEERYERIEIPIHIVPHVTIGKVCLESAVELPKILCQEEQDAYRRIHSLTHLDSVTKIHNGSVFTKNLCSQMSAVSGPLLQWLEDRLEQNQQHLQELQQEKEELMQELSSLE

SEQ ID NO: 221 - protein, 960 aa, Homo sapiens
MWRLRRAAVACEVCQSLVKHSSGIKGSLPLQKLHLVSRSIYHSHHPTLKLQRPQLRTSFQQFSSLTNLPLRKLKFSPIKYGYQPRRNFWPARLATRLLKLRYLILGSAVGGGYTAKKTFDQWKDMIPDLSEYKWIVPDIVWEIDEYIDFEKIRKALPSSEDLVKLAPDFDKIVESLSLLKDFFTSGSPEETAFRATDRGSESDKHFRKVSDKEKIDQLQEELLHTQLKYQRILERLEKENKELRKLVLQKDDKGIHHRKLKKSLIDMYSEVLDVLSDYDASYNTQDHLPRVVVVGDQSAGKTSVLEMIAQARIFPRGSGEMMTRSPVKVTLSEGPHHVALFKDSSREFDLTKEEDLAALRHEIELRMRKNVKEGCTVSPETISLNVKGPGLQRMVLVDLPGVINTVTSGMAPDTKETIFSISKAYMQNPNAIILCIQDGSVDAERSIVTDLVSQMDPHGRRTIFVLTKVDLAEKNVASPSRIQQIIEGKLFPMKALGYFAVVTGKGNSSESIEAIREYEEEFFQNSKLLKTSMLKAHQVTTRNLSLAVSDCFWKMVRESVEQQADSFKATRFNLETEWKNNYPRLRELDRNELFEKAKNEILDEVISLSQVTPKHWEEILQQSLWERVSTHVIENIYLPAAQTMNSGTFNTTVDIKLKQWTDKQLPNKAVEVAWETLQEEFSRFMTEPKGKEHDDIFDKLKEAVKEESIKRHKWNDFAEDSLRVIQHNALEDRSISDKQQWDAAIYFMEEALQARLKDTENAIENMVGPDWKKRWLYWKNRTQEQCVHNETKNELEKMLKCNEEHPAYLASDEITTVRKNLESRGVEVDPSLIKDTWHQVYRRHFLKTALNHCNLCRRGFYYYQRHFVDSELECNDVVLFWRIQRMLAITANTLRQQLTNTEVRRLEKNVKEVLEDFAEDGEKKIKLLTGKRVQLAEDLKKVREIQEKLDAFIEALHQEK

SEQ ID NO: 222 - protein, 477 aa, Homo sapiens
MGRTVVVLGGGISGLAASYHLSRAPCPPKVVLVESSERLGGWIRSVRGPNGAIFELGPRGIRPAGALGARTLLLVSELGLDSEVLPVRGDHPAAQNRFLYVGGALHALPTGLRGLLRPSPPFSKPLFWAGLRELTKPRGKEPDETVHSFAQRRLGPEVASLAMDSLCRGVFAGNSRELSIRSCFPSLFQAEQTHRSILLGLLLGAGRTPQPDSALIRQALAERWSQWSLRGGLEMLPQALETHLTSRGVSVLRGQPVCGLSLQAEGRWKVSLRDSSLEADHVISAIPASVLSELLPAEAAPLARALSAITAVSVAVVNLQYQGAHLPVQGFGHLVPSSEDPGVLGIVYDSVAFPEQDGSPPGLRVTVMLGGSWLQTLEASGCVLSQELFQQRAQEAAATQLGLKEMPSHCLVHLHKNCIPQYTLGHWQKLESARQFLTAHRLPLTLAGASYEGVAVNDCIESGRQAAVSVLGTEPNS

SEQ ID NO: 223 - protein, 210 aa, Homo sapiens
MWTLGRRAVAGLLASPSPAQAQTLTRVPRPAELAPLCGRRGLRTDIDATCTPRRASSNQRGLNQIWNVKKQSVYLMNLRKSGTLGHPGSLDETTYERLAEETLDSLAEFFEDLADKPYTFEDYDVSFGSGVLTVKLGGDLGTYVINKQTPNKQIWLSSPSSGPKRYDWTGKNWVYSHDGVSLHELLAAELTKALKTKLDLSSLAYSGKDA

SEQ ID NO: 224 - protein, 1239 aa, Homo sapiens
MSRLLWRKVAGATVGPGPVPAPGRWVSSSVPASDPSDGQRRRQQQQQQQQQQQQQPQQPQVLSSEGGQLRHNPLDIQMLSRGLHEQIFGQGGEMPGEAAVRRSVEHLQKHGLWGQPAVPLPDVELRLPPLYGDNLDQHFRLLAQKQSLPYLEAANLLLQAQLPPKPPAWAWAEGWTRYGPEGEAVPVAIPEERALVFDVEVCLAEGTCPTLAVAISPSAWYSWCSQRLVEERYSWTSQLSPADLIPLEVPTGASSPTQRDWQEQLVVGHNVSFDRAHIREQYLIQGSRMRFLDTMSMHMAISGLSSFQRSLWIAAKQGKHKVQPPTKQGQKSQRKARRGPAISSWDWLDISSVNSLAEVHRLYVGGPPLEKEPRELFVKGTMKDIRENFQDLMQYCAQDVWATHEVFQQQLPLFLERCPHPVTLAGMLEMGVSYLPVNQNWERYLAEAQGTYEELQREMKKSLMDLANDACQLLSGERYKEDPWLWDLEWDLQEFKQKKAKKVKKEPATASKLPIEGAGAPGDPMDQEDLGPCSEEEEFQQDVMARACLQKLKGTTELLPKRPQHLPGHPGWYRKLCPRLDDPAWTPGPSLLSLQMRVTPKLMALTWDGFPLHYSERHGWGYLVPGRRDNLAKLPTGTTLESAGVVCPYRAIESLYRKHCLEQGKQQLMPQEAGLAEEFLLTDNSAIWQTVEELDYLEVEAEAKMENLRAAVPGQPLALTARGGPKDTQPSYHHGNGPYNDVDIPGCWFFKLPHKDGNSCNVGSPFAKDFLPKMEDGTLQAGPGGASGPRALEINKMISFWRNAHKRISSQMVVWLPRSALPRAVIRHPDYDEEGLYGAILPQVVTAGTITRRAVEPTWLTASNARPDRVGSELKAMVQAPPGYTLVGADVDSQELWIAAVLGDAHFAGMHGCTAFGWMTLQGRKSRGTDLHSKTATTVGISREHAKIFNYGRIYGAGQPFAERLLMQFNHRLTQQEAAEKAQQMYAATKGLRWYRLSDEGEWLVRELNLPVDRTEGGWISLQDLRKVQRETARKSQWKKWEVVAERAWKGGTESEMFNKLESIATSDIPRTPVLGCCISRALEPSAVQEEFMTSRVNWVVQSSAVDYLHLMLVAMKWLFEEFAIDGRFCISIHDEVRYLVREEDRYRAALALQITNLLTRCMFAYKLGLNDLPQSVAFFSAVDIDRCLRKEVTMDCKTPSNPTGMERRYGIPQGEALDIYQIIELTKGSLEKRSQPGP

SEQ ID NO: 225 - protein, 452 aa, Artificial Sequence
  Description of Artificial Sequence: Synthetic polypeptide
MAAATLLRATPHFSGLAAGRTFLLQGLLRLLKAPALPLLCRGLAVEAKKTYVRDKPHVNVGTIGHVDHGKTTLTAAITKILAEGGGAKFKKYEEIDNAPEERARGITINAAHVEYSTAARHYAHTDCPGHADYVKNMITGTAPLDGCILVVAANDGPMPQTREHLLLARQIGVEHVVVYVNKADAVQDSEMVELVELEIRELLTEFGYKGEETPVIVGSALCALEGRDPELGLKSVQKLLDAVDTYIPVPARDLEKPFLLPVEAVYSVPGRGTVVTGTLERGILKKGDECELLGHSKNIRTVVTGIEMFHKSLERAEAGDNLGALVRGLKREDLRRGLVMVKPGSIKPHQKVEAQVYILSKEEGGRHKPFVSHFMPVMFSLTWDMACRIILPPEKELAMPGEDLKFNLILRQPMILEKGQRFTLRDGNRTIGTGLVTNTLAMTEEEKNIKWG

SEQ ID NO: 226 - protein, 192 aa, Artificial Sequence
  Description of Artificial Sequence: Synthetic polypeptide
MDGSGEQPRGGGPTSSEQIMKTGALLLQGFIQDRAGRMGGEAPELALDPVPQDASTKKLSECLKRIGDELDSNMELQRMIAAVDTDSPREVFFRVAADMFSDGNFNWGRVVALFYFASKLVLKALCTKVPELIRTIMGWTLDFLRERLLGWIQDQGGWDGLLSYFGTPTWQTVTIFVAGVLTASLTIWKKMG

SEQ ID NO: 227 - protein, 238 aa, Artificial Sequence
  Description of Artificial Sequence: Synthetic polypeptide
VSKGEELFTGVVPILVELDGDVNGHKFSVSGEGEGDATYGKLTLKFICTTGKLPVPWPTLVTTFGYGLQCFARYPDHMKQHDFFKSAMPEGYVQERTIFFKDDGNYKTRAEVKFEGDTLVNRIELKGIDFKEDGNILGHKLEYNYNSHNVYIMADKQKNGIKVNFKIRHNIEDGSVQLADHYQQNTPIGDGPVLLPDNHYLSYQSALSKDPNEKRDHMVLLEFVTAAGITLGMDELYK

SEQ ID NO: 228 - protein, 236 aa, Artificial Sequence
  Description of Artificial Sequence: Synthetic polypeptide
MVSKGEEDNMAIIKEFMRFKVHMEGSVNGHEFEIEGEGEGRPYEGTQTAKLKVTKGGPLPFAWDILSPQFMYGSKAYVKHPADIPDYLKLSFPEGFKWERVMNFEDGGVVTVTQDSSLQDGEFIYKVKLRGTNFPSDGPVMQKKTMGWEASSERMYPEDGALKGEIKQRLKLKDGGHYDAEVKTTYKAKKPVQLPGAYNVNIKLDITSHNEDYTIVEQYERAEGRHSTGGMDELYK

SEQ ID NO: 229 - protein, 239 aa, Artificial Sequence
  Description of Artificial Sequence: Synthetic polypeptide
MVSKGEELFTGVVPILVELDGDVNGHKFSVSGEGEGDATYGKLTLKFICTTGKLPVPWPTLVTTLTWGVQCFSRYPDHMKQHDFFKSAMPEGYVQERTIFFKDDGNYKTRAEVKFEGDTLVNRIELKGIDFKEDGNILGHKLEYNYISHNVYITADKQKNGIKANFKIRHNIEDGSVQLADHYQQNTPIGDGPVLLPDNHYLSTQSALSKDPNEKRDHMVLLEFVTAAGITLGMDELYK

SEQ ID NO: 230 - protein, 22 aa, Artificial Sequence
  Description of Artificial Sequence: Synthetic peptide
GSGATNFSLLKQAGDVEENPGP

SEQ ID NO: 231 - protein, 21 aa, Artificial Sequence
  Description of Artificial Sequence: Synthetic peptide
GSGEGRGSLLTCGDVEENPGP

SEQ ID NO: 232 - protein, 23 aa, Artificial Sequence
  Description of Artificial Sequence: Synthetic peptide
GSGQCTNYALLKLAGDVESNPGP

SEQ ID NO: 233 - protein, 115 aa, Artificial Sequence [sequence omitted]

SEQ ID NO: 234 - protein, 120 aa, Artificial Sequence
  Description of Artificial Sequence: Synthetic polypeptide
QVQLQESGGGLAQAGGSLRLSCAASGRMFSINNMGWYRQAPGKQRELVAFITRGGTTTYADSMKGRVTISRDNAKNTVYLQMNSLKPEDTAVYYCAADDINNPRRTTTYWGQGTQVTISS

SEQ ID NO: 235 - protein, 127 aa, Artificial Sequence
  Description of Artificial Sequence: Synthetic polypeptide
DVQLQASGGGLVQAGGSLRLSCAASGRTFSSYAMGWFRRAPGKEREFVAAISWSGTNTNYADSVKGRFTISRDNAKNTMYLQMNRLAPEDTAVYYCAATSTRTYYYTTSRSNEYVYWGQGTQVTVSS

SEQ ID NO: 236 - protein, 125 aa, Artificial Sequence
  Description of Artificial Sequence: Synthetic polypeptide
DVQLQASGGGLVQAGGSLRLSCAASGRTNSWYSMGWFRQAPGKEREFVAAISWNGDAIYYTDSVKGRFTISRDNTKNTVYLQMNSLKPEDTAVYICAAHAAAFTEAAHIPGYEYWGQGTQVTVSS

SEQ ID NO: 237 - protein, 394 aa, Artificial Sequence
  Description of Artificial Sequence: Synthetic polypeptide
PPSFSEGSGGSRTPEKGFSDREPTRPPRPILQRQDDIVQEKRLSRGISHASSSIVSLARSHVSSNGGGGGSNEHPLEMPICAFQLPDLTVYNEDFRSFIERDLIEQSMLVALEQAGRLNWWVSVDPTSQRLLPLATTGDGNCLLHAASLGMWGFHDRDLMLRKALYALMEKGVEKEALKRRWRWQQTQQNKESGLVYTEDEWQKEWNELIKLASSEPRMHLGTNGANCGGVESSEEPVYESLEEFHVFVLAHVLRRPIVVVADTMLRDSGGEAFAPIPFGGIYLPLEVPASQCHRSPLVLAYDQAHFSALVSMEQKENTKEQAVIPLTDSEYKLLPLHFAVDPGKGWEWGKDDSDNVRLASVILSLEVKLHLLHSYMNVKWIPLSSDAQAPLAQ

SEQ ID NO: 238 - protein, 195 aa, Artificial Sequence
  Description of Artificial Sequence: Synthetic polypeptide
DEKLALYLAEVEKQDKYLRQRNKYRFHIIPDGNCLYRAVSKTVYGDQSLHRELREQTVHYIADHLDHFSPLIEGDVGEFIIAAAQDGAWAGYPELLAMGQMLNVNIHLTTGGRLESPTVSTMIHYLGPEDSLRPSIWLSWLSNGHYDAVFDHSYPNPEYDNWCKQTQVQRKRDEELAKSMAISLSKMYIEQNACS

SEQ ID NO: 239 - protein, 453 aa, Artificial Sequence
  Description of Artificial Sequence: Synthetic polypeptide
LEVDFKKLKQIKNRMKKTDWLFLNACVGVVEGDLAAIEAYKSSGGDIARQLTADEVRLLNRPSAFDVGYTLVHLAIRFQRQDMLAILLTEVSQQAAKCIPAMVCPELTEQIRREIAASLHQRKGDFACYFLTDLVTFTLPADIEDLPPTVQEKLFDEVLDRDVQKELEEESPIINWSLELATRLDSRLYALWNRTAGDCLLDSVLQATWGIYDKDSVLRKALHDSLHDCSHWFYTRWKDWESWYSQSFGLHFSLREEQWQEDWAFILSLASQPGASLEQTHIFVLAHILRRPIIVYGVKYYKSFRGETLGYTRFQGVYLPLLWEQSFCWKSPIALGYTRGHFSALVAMENDGYGNRGAGANLNTDDDVTITFLPLVDSERKLLHVHFLSAQELGNEEQQEKLLREWLDCCVTEGGVLVAMQKSSRRRNHPLVTQMVEKWLDRYRQIRPCTSLS

SEQ ID NO: 240 - protein, 370 aa, Artificial Sequence
  Description of Artificial Sequence: Synthetic polypeptide
SDDKMAHHTLLLGSGHVGLRNLGNTCFLNAVLQCLSSTRPLRDFCLRRDFRQEVPGGGRAQELTEAFADVIGALWHPDSCEAVNPTRFRAVFQKYVPSFSGYSQQDAQEFLKLLMERLHLEINRRGRRAPPILANGPVPSPPRRGGALLEEPELSDDDRANLMWKRYLEREDSKIVDLFVGQLKSCLKCQACGYRSTTFEVFCDLSLPIPKKGFAGGKVSLRDCFNLFTKEEELESENAPVCDRCRQKTRSTKKLTVQRFPRILVLHLNRFSASRGSIKKSSVGVDFPLQRLSLGDFASDKAGSPVYQLYALCNHSGSVHYGHYTALCRCQTGWHVYNDSRVSPVSENQVASSEGYVLFYQLMQEPPRCL

SEQ ID NO: 241 - protein, 175 aa, Artificial Sequence
  Description of Artificial Sequence: Synthetic polypeptide
ATPMDAYLRKLGLYRKLVAKDGSCLFRAVAEQVLHSQSRHVEVRMACIHYLRENREKFEAFIEGSFEEYLKRLENPQEWVGQVEISALSLMYRKDFIIYREPNVSPSQVTENNFPEKVLLCFSNGNHYDIVYPIKYKESSAMCQSLLYELLYEKVFKTDVSKIVMELDTLEVADE

SEQ ID NO: 242 - protein, 520 aa, Artificial Sequence; identical to SEQ ID NO: 3
  Description of Artificial Sequence: Synthetic polypeptide

SEQ ID NO: 243 - protein, 948 aa, Artificial Sequence
  Description of Artificial Sequence: Synthetic polypeptide
MAAATLLRATPHFSGLAAGRTFLLQGLLRLLKAPALPLLCRGLAVEAKKTYVRDKPHVNVGTIGHVDHGKTTLTAAITKILAEGGGAKFKKYEEIDNAPEERARGITINAAHVEYSTAARHYAHTDCPGHADYVKNMITGTAPLDGCILVVAANDGPMPQTREHLLLARQIGVEHVVVYVNKADAVQDSEMVELVELEIRELLTEFGYKGEETPVIVGSALCALEGRDPELGLKSVQKLLDAVDTYIPVPARDLEKPFLLPVEAVYSVPGRGTVVTGTLERGILKKGDECELLGHSKNIRTVVTGIEMFHKSLERAEAGDNLGALVRGLKREDLRRGLVMVKPGSIKPHQKVEAQVYILSKEEGGRHKPFVSHFMPVMFSLTWDMACRIILPPEKELAMPGEDLKFNLILRQPMILEKGQRFTLRDGNRTIGTGLVTNTLAMTEEEKNIKWGVSKGEELFTGVVPILVELDGDVNGHKFSVSGEGEGDATYGKLTLKFICTTGKLPVPWPTLVTTFGYGLQCFARYPDHMKQHDFFKSAMPEGYVQERTIFFKDDGNYKTRAEVKFEGDTLVNRIELKGIDFKEDGNILGHKLEYNYNSHNVYIMADKQKNGIKVNFKIRHNIEDGSVQLADHYQQNTPIGDGPVLLPDNHYLSYQSALSKDPNEKRDHMVLLEFVTAAGITLGMDELYKGSGATNFSLLKQAGDVEENPGPMVSKGEEDNMAIIKEFMRFKVHMEGSVNGHEFEIEGEGEGRPYEGTQTAKLKVTKGGPLPFAWDILSPQFMYGSKAYVKHPADIPDYLKLSFPEGFKWERVMNFEDGGVVTVTQDSSLQDGEFIYKVKLRGTNFPSDGPVMQKKTMGWEASSERMYPEDGALKGEIKQRLKLKDGGHYDAEVKTTYKAKKPVQLPGAYNVNIKLDITSHNEDYTIVEQYERAEGRHSTGGMDELYK

SEQ ID NO: 244 - protein, 688 aa, Artificial Sequence
  Description of Artificial Sequence: Synthetic polypeptide
MDGSGEQPRGGGPTSSEQIMKTGALLLQGFIQDRAGRMGGEAPELALDPVPQDASTKKLSECLKRIGDELDSNMELQRMIAAVDTDSPREVFFRVAADMFSDGNFNWGRVVALFYFASKLVLKALCTKVPELIRTIMGWTLDFLRERLLGWIQDQGGWDGLLSYFGTPTWQTVTIFVAGVLTASLTIWKKMGVSKGEELFTGVVPILVELDGDVNGHKFSVSGEGEGDATYGKLTLKFICTTGKLPVPWPTLVTTFGYGLQCFARYPDHMKQHDFFKSAMPEGYVQERTIFFKDDGNYKTRAEVKFEGDTLVNRIELKGIDFKEDGNILGHKLEYNYNSHNVYIMADKQKNGIKVNFKIRHNIEDGSVQLADHYQQNTPIGDGPVLLPDNHYLSYQSALSKDPNEKRDHMVLLEFVTAAGITLGMDELYKGSGATNFSLLKQAGDVEENPGPMVSKGEEDNMAIIKEFMRFKVHMEGSVNGHEFEIEGEGEGRPYEGTQTAKLKVTKGGPLPFAWDILSPQFMYGSKAYVKHPADIPDYLKLSFPEGFKWERVMNFEDGGVVTVTQDSSLQDGEFIYKVKLRGTNFPSDGPVMQKKTMGWEASSERMYPEDGALKGEIKQRLKLKDGGHYDAEVKTTYKAKKPVQLPGAYNVNIKLDITSHNEDYTIVEQYERAEGRHSTGGMDELYK

SEQ ID NO: 245 - protein, 655 aa, Artificial Sequence
  Description of Artificial Sequence: Synthetic polypeptide
MVSKGEELFTGVVPILVELDGDVNGHKFSVSGEGEGDATYGKLTLKFICTTGKLPVPWPTLVTTLTWGVQCFSRYPDHMKQHDFFKSAMPEGYVQERTIFFKDDGNYKTRAEVKFEGDTLVNRIELKGIDFKEDGNILGHKLEYNYISHNVYITADKQKNGIKANFKIRHNIEDGSVQLADHYQQNTPIGDGPVLLPDNHYLSTQSALSKDPNEKRDHMVLLEFVTAAGITLGMDELYKGSGATNFSLLKQAGDVEENPGPPPSFSEGSGGSRTPEKGFSDREPTRPPRPILQRQDDIVQEKRLSRGISHASSSIVSLARSHVSSNGGGGGSNEHPLEMPICAFQLPDLTVYNEDFRSFIERDLIEQSMLVALEQAGRLNWWVSVDPTSQRLLPLATTGDGNCLLHAASLGMWGFHDRDLMLRKALYALMEKGVEKEALKRRWRWQQTQQNKESGLVYTEDEWQKEWNELIKLASSEPRMHLGTNGANCGGVESSEEPVYESLEEFHVFVLAHVLRRPIVVVADTMLRDSGGEAFAPIPFGGIYLPLEVPASQCHRSPLVLAYDQAHFSALVSMEQKENTKEQAVIPLTDSEYKLLPLHFAVDPGKGWEWGKDDSDNVRLASVILSLEVKLHLLHSYMNVKWIPLSSDAQAPLAQ

SEQ ID NO: 246 - protein, 456 aa, Artificial Sequence
  Description of Artificial Sequence: Synthetic polypeptide
MVSKGEELFTGVVPILVELDGDVNGHKFSVSGEGEGDATYGKLTLKFICTTGKLPVPWPTLVTTLTWGVQCFSRYPDHMKQHDFFKSAMPEGYVQERTIFFKDDGNYKTRAEVKFEGDTLVNRIELKGIDFKEDGNILGHKLEYNYISHNVYITADKQKNGIKANFKIRHNIEDGSVQLADHYQQNTPIGDGPVLLPDNHYLSTQSALSKDPNEKRDHMVLLEFVTAAGITLGMDELYKGSGATNFSLLKQAGDVEENPGPDEKLALYLAEVEKQDKYLRQRNKYRFHIIPDGNCLYRAVSKTVYGDQSLHRELREQTVHYIADHLDHFSPLIEGDVGEFIIAAAQDGAWAGYPELLAMGQMLNVNIHLTTGGRLESPTVSTMIHYLGPEDSLRPSIWLSWLSNGHYDAVFDHSYPNPEYDNWCKQTQVQRKRDEELAKSMAISLSKMYIEQNACS

SEQ ID NO: 247 - protein, 714 aa, Artificial Sequence
  Description of Artificial Sequence: Synthetic polypeptide
MVSKGEELFTGVVPILVELDGDVNGHKFSVSGEGEGDATYGKLTLKFICTTGKLPVPWPTLVTTLTWGVQCFSRYPDHMKQHDFFKSAMPEGYVQERTIFFKDDGNYKTRAEVKFEGDTLVNRIELKGIDFKEDGNILGHKLEYNYISHNVYITADKQKNGIKANFKIRHNIEDGSVQLADHYQQNTPIGDGPVLLPDNHYLSTQSALSKDPNEKRDHMVLLEFVTAAGITLGMDELYKGSGATNFSLLKQAGDVEENPGPLEVDFKKLKQIKNRMKKTDWLFLNACVGVVEGDLAAIEAYKSSGGDIARQLTADEVRLLNRPSAFDVGYTLVHLAIRFQRQDMLAILLTEVSQQAAKCIPAMVCPELTEQIRREIAASLHQRKGDFACYFLTDLVTFTLPADIEDLPPTVQEKLFDEVLDRDVQKELEEESPIINWSLELATRLDSRLYALWNRTAGDCLLDSVLQATWGIYDKDSVLRKALHDSLHDCSHWFYTRWKDWESWYSQSFGLHFSLREEQWQEDWAFILSLASQPGASLEQTHIFVLAHILRRPIIVYGVKYYKSFRGETLGYTRFQGVYLPLLWEQSFCWKSPIALGYTRGHFSALVAMENDGYGNRGAGANLNTDDDVTITFLPLVDSERKLLHVHFLSAQELGNEEQQEKLLREWLDCCVTEGGVLVAMQKSSRRRNHPLVTQMVEKWLDRYRQIRPCTSLS

SEQ ID NO: 248 - protein, 631 aa, Artificial Sequence
  Description of Artificial Sequence: Synthetic polypeptide
MVSKGEELFTGVVPILVELDGDVNGHKFSVSGEGEGDATYGKLTLKFICTTGKLPVPWPTLVTTLTWGVQCFSRYPDHMKQHDFFKSAMPEGYVQERTIFFKDDGNYKTRAEVKFEGDTLVNRIELKGIDFKEDGNILGHKLEYNYISHNVYITADKQKNGIKANFKIRHNIEDGSVQLADHYQQNTPIGDGPVLLPDNHYLSTQSALSKDPNEKRDHMVLLEFVTAAGITLGMDELYKGSGATNFSLLKQAGDVEENPGPSDDKMAHHTLLLGSGHVGLRNLGNTCFLNAVLQCLSSTRPLRDFCLRRDFRQEVPGGGRAQELTEAFADVIGALWHPDSCEAVNPTRFRAVFQKYVPSFSGYSQQDAQEFLKLLMERLHLEINRRGRRAPPILANGPVPSPPRRGGALLEEPELSDDDRANLMWKRYLEREDSKIVDLFVGQLKSCLKCQACGYRSTTFEVFCDLSLPIPKKGFAGGKVSLRDCFNLFTKEEELESENAPVCDRCRQKTRSTKKLTVQRFPRILVLHLNRFSASRGSIKKSSVGVDFPLQRLSLGDFASDKAGSPVYQLYALCNHSGSVHYGHYTALCRCQTGWHVYNDSRVSPVSENQVASSEGYVLFYQLMQEPPRCL

SEQ ID NO: 249 - protein, 436 aa, Artificial Sequence
  Description of Artificial Sequence: Synthetic polypeptide
MVSKGEELFTGVVPILVELDGDVNGHKFSVSGEGEGDATYGKLTLKFICTTGKLPVPWPTLVTTLTWGVQCFSRYPDHMKQHDFFKSAMPEGYVQERTIFFKDDGNYKTRAEVKFEGDTLVNRIELKGIDFKEDGNILGHKLEYNYISHNVYITADKQKNGIKANFKIRHNIEDGSVQLADHYQQNTPIGDGPVLLPDNHYLSTQSALSKDPNEKRDHMVLLEFVTAAGITLGMDELYKGSGATNFSLLKQAGDVEENPGPATPMDAYLRKLGLYRKLVAKDGSCLFRAVAEQVLHSQSRHVEVRMACIHYLRENREKFEAFIEGSFEEYLKRLENPQEWVGQVEISALSLMYRKDFIIYREPNVSPSQVTENNFPEKVLLCFSNGNHYDIVYPIKYKESSAMCQSLLYELLYEKVFKTDVSKIVMELDTLEVADE

SEQ ID NO: 250 - protein, 770 aa, Artificial Sequence
  Description of Artificial Sequence: Synthetic polypeptide
MVSKGEELFTGVVPILVELDGDVNGHKFSVSGEGEGDATYGKLTLKFICTTGKLPVPWPTLVTTLTWGVQCFSRYPDHMKQHDFFKSAMPEGYVQERTIFFKDDGNYKTRAEVKFEGDTLVNRIELKGIDFKEDGNILGHKLEYNYISHNVYITADKQKNGIKANFKIRHNIEDGSVQLADHYQQNTPIGDGPVLLPDNHYLSTQSALSKDPNEKRDHMVLLEFVTAAGITLGMDELYKGSGATNFSLLKQAGDVEENPGPQVQLVESGGALVQPGGSLRLSCAASGFPVNRYSMRWYRQAPGKEREWVAGMSSAGDRSSYEDSVKGRFTISRDDARNTVYLQMNSLKPEDTAVYYCNVNVGFEYWGQGTQVTVSSPPSFSEGSGGSRTPEKGFSDREPTRPPRPILQRQDDIVQEKRLSRGISHASSSIVSLARSHVSSNGGGGGSNEHPLEMPICAFQLPDLTVYNEDFRSFIERDLIEQSMLVALEQAGRLNWWVSVDPTSQRLLPLATTGDGNCLLHAASLGMWGFHDRDLMLRKALYALMEKGVEKEALKRRWRWQQTQQNKESGLVYTEDEWQKEWNELIKLASSEPRMHLGTNGANCGGVESSEEPVYESLEEFHVFVLAHVLRRPIVVVADTMLRDSGGEAFAPIPFGGIYLPLEVPASQCHRSPLVLAYDQAHFSALVSMEQKENTKEQAVIPLTDSEYKLLPLHFAVDPGKGWEWGKDDSDNVRLASVILSLEVKLHLLHSYMNVKWIPLSSDAQAPLAQ

SEQ ID NO: 251 - protein, 571 aa, Artificial Sequence
  Description of Artificial Sequence: Synthetic polypeptide
MVSKGEELFTGVVPILVELDGDVNGHKFSVSGEGEGDATYGKLTLKFICTTGKLPVPWPTLVTTLTWGVQCFSRYPDHMKQHDFFKSAMPEGYVQERTIFFKDDGNYKTRAEVKFEGDTLVNRIELKGIDFKEDGNILGHKLEYNYISHNVYITADKQKNGIKANFKIRHNIEDGSVQLADHYQQNTPIGDGPVLLPDNHYLSTQSALSKDPNEKRDHMVLLEFVTAAGITLGMDELYKGSGATNFSLLKQAGDVEENPGPQVQLVESGGALVQPGGSLRLSCAASGFPVNRYSMRWYRQAPGKEREWVAGMSSAGDRSSYEDSVKGRFTISRDDARNTVYLQMNSLKPEDTAVYYCNVNVGFEYWGQGTQVTVSSDEKLALYLAEVEKQDKYLRQRNKYRFHIIPDGNCLYRAVSKTVYGDQSLHRELREQTVHYIADHLDHFSPLIEGDVGEFIIAAAQDGAWAGYPELLAMGQMLNVNIHLTTGGRLESPTVSTMIHYLGPEDSLRPSIWLSWLSNGHYDAVFDHSYPNPEYDNWCKQTQVQRKRDEELAKSMAISLSKMYIEQNACS

SEQ ID NO: 252 - protein, 828 aa, Artificial Sequence
  Description of Artificial Sequence: Synthetic polypeptide
MVSKGEELFTGVVPILVELDGDVNGHKFSVSGEGEGDATYGKLTLKFICTTGKLPVPWPTLVTTLTWGVQCFSRYPDHMKQHDFFKSAMPEGYVQERTIFFKDDGNYKTRAEVKFEGDTLVNRIELKGIDFKEDGNILGHKLEYNYISHNVYITADKQKNGIKANFKIRHNIEDGSVQLADHYQQNTPIGDGPVLLPDNHYLSTQSALSKDPNEKRDHMVLLEFVTAAGITLGMDELYKGSGATNFSLLKQAGDVEENPGPQVQLVESGGALVQPGGSLRLSCAASGFPVNRYSMRWYRQAPGKEREWVAGMSSAGDRSSYEDSVKGRFTISRDDARNTVYLQMNSLKPEDTAVYYCNVNVGFEYWGQGTQVTVSSLEVDFKKLKQIKNRMKKTDWLFLNACVGVVEGDLAAIEAYKSSGGDIARQLTADEVRLLNRPSAFDVGYTLVHLAIRFQRQDMLAILLTEVSQQAAKCIPAMVCPELTEQIRREIAASLHQRKGDFACYFLTDLVTFTLPADIEDLPPTVQEKLFDEVLDRDVQKELEEESPIINWSLELATRLDSRLYALWNRTAGDCLLDSVLQATWGIYDKDSVLRKALHDSLHDCSHWFYTRWKDWESWYSQSFGLHFSLREEQWQEDWAFILSLASQPGASLEQTHIFVLAHILRRPIIVYGVKYYKSFRGETLGYTRFQGVYLPLLWEQSFCWKSPIALGYTRGHFSALVAMENDGYGNRGAGANLNTDDDVTITFLPLVDSERKLLHVHFLSAQELGNEEQQEKLLREWLDCCVTEGGVLVAMQKSSRRRNHPLVTQMVEKWLDRYRQIRPCTSL

SEQ ID NO: 253 - protein, 746 aa, Artificial Sequence
  Description of Artificial Sequence: Synthetic polypeptide
MVSKGEELFTGVVPILVELDGDVNGHKFSVSGEGEGDATYGKLTLKFICTTGKLPVPWPTLVTTLTWGVQCFSRYPDHMKQHDFFKSAMPEGYVQERTIFFKDDGNYKTRAEVKFEGDTLVNRIELKGIDFKEDGNILGHKLEYNYISHNVYITADKQKNGIKANFKIRHNIEDGSVQLADHYQQNTPIGDGPVLLPDNHYLSTQSALSKDPNEKRDHMVLLEFVTAAGITLGMDELYKGSGATNFSLLKQAGDVEENPGPQVQLVESGGALVQPGGSLRLSCAASGFPVNRYSMRWYRQAPGKEREWVAGMSSAGDRSSYEDSVKGRFTISRDDARNTVYLQMNSLKPEDTAVYYCNVNVGFEYWGQGTQVTVSSSDDKMAHHTLLLGSGHVGLRNLGNTCFLNAVLQCLSSTRPLRDFCLRRDFRQEVPGGGRAQELTEAFADVIGALWHPDSCEAVNPTRFRAVFQKYVPSFSGYSQQDAQEFLKLLMERLHLEINRRGRRAPPILANGPVPSPPRRGGALLEEPELSDDDRANLMWKRYLEREDSKIVDLFVGQLKSCLKCQACGYRSTTFEVFCDLSLPIPKKGFAGGKVSLRDCFNLFTKEEELESENAPVCDRCRQKTRSTKKLTVQRFPRILVLHLNRFSASRGSIKKSSVGVDFPLQRLSLGDFASDKAGSPVYQLYALCNHSGSVHYGHYTALCRCQTGWHVYNDSRVSPVSENQVASSEGYVLFYQLMQEPPRCL

SEQ ID NO: 254 - protein, 551 aa, Artificial Sequence
  Description of Artificial Sequence: Synthetic polypeptide
MVSKGEELFTGVVPILVELDGDVNGHKFSVSGEGEGDATYGKLTLKFICTTGKLPVPWPTLVTTLTWGVQCFSRYPDHMKQHDFFKSAMPEGYVQERTIFFKDDGNYKTRAEVKFEGDTLVNRIELKGIDFKEDGNILGHKLEYNYISHNVYITADKQKNGIKANFKIRHNIEDGSVQLADHYQQNTPIGDGPVLLPDNHYLSTQSALSKDPNEKRDHMVLLEFVTAAGITLGMDELYKGSGATNFSLLKQAGDVEENPGPQVQLVESGGALVQPGGSLRLSCAASGFPVNRYSMRWYRQAPGKEREWVAGMSSAGDRSSYEDSVKGRFTISRDDARNTVYLQMNSLKPEDTAVYYCNVNVGFEYWGQGTQVTVSSATPMDAYLRKLGLYRKLVAKDGSCLFRAVAEQVLHSQSRHVEVRMACIHYLRENREKFEAFIEGSFEEYLKRLENPQEWVGQVEISALSLMYRKDFIIYREPNVSPSQVTENNFPEKVLLCFSNGNHYDIVYPIKYKESSAMCQSLLYELLYEKVFKTDVSKIVMELDTLEVADE

SEQ ID NO: 255 - protein, 775 aa, Artificial Sequence
  Description of Artificial Sequence: Synthetic polypeptide
MVSKGEELFTGVVPILVELDGDVNGHKFSVSGEGEGDATYGKLTLKFICTTGKLPVPWPTLVTTLTWGVQCFSRYPDHMKQHDFFKSAMPEGYVQERTIFFKDDGNYKTRAEVKFEGDTLVNRIELKGIDFKEDGNILGHKLEYNYISHNVYITADKQKNGIKANFKIRHNIEDGSVQLADHYQQNTPIGDGPVLLPDNHYLSTQSALSKDPNEKRDHMVLLEFVTAAGITLGMDELYKGSGATNFSLLKQAGDVEENPGPQVQLQESGGGLAQAGGSLRLSCAASGRMFSINNMGWYRQAPGKQRELVAFITRGGTTTYADSMKGRVTISRDNAKNTVYLQMNSLKPEDTAVYYCAADDINNPRRTTTYWGQGTQVTISSPPSFSEGSGGSRTPEKGFSDREPTRPPRPILQRQDDIVQEKRLSRGISHASSSIVSLARSHVSSNGGGGGSNEHPLEMPICAFQLPDLTVYNEDFRSFIERDLIEQSMLVALEQAGRLNWWVSVDPTSQRLLPLATTGDGNCLLHAASLGMWGFHDRDLMLRKALYALMEKGVEKEALKRRWRWQQTQQNKESGLVYTEDEWQKEWNELIKLASSEPRMHLGTNGANCGGVESSEEPVYESLEEFHVFVLAHVLRRPIVVVADTMLRDSGGEAFAPIPFGGIYLPLEVPASQCHRSPLVLAYDQAHFSALVSMEQKENTKEQAVIPLTDSEYKLLPLHFAVDPGKGWEWGKDDSDNVRLASVILSLEVKLHLLHSYMNVKWIPLSSDAQAPLAQ

SEQ ID NO: 256 - protein, 576 aa, Artificial Sequence
  Description of Artificial Sequence: Synthetic polypeptide
MVSKGEELFTGVVPILVELDGDVNGHKFSVSGEGEGDATYGKLTLKFICTTGKLPVPWPTLVTTLTWGVQCFSRYPDHMKQHDFFKSAMPEGYVQERTIFFKDDGNYKTRAEVKFEGDTLVNRIELKGIDFKEDGNILGHKLEYNYISHNVYITADKQKNGIKANFKIRHNIEDGSVQLADHYQQNTPIGDGPVLLPDNHYLSTQSALSKDPNEKRDHMVLLEFVTAAGITLGMDELYKGSGATNFSLLKQAGDVEENPGPQVQLQESGGGLAQAGGSLRLSCAASGRMFSINNMGWYRQAPGKQRELVAFITRGGTTTYADSMKGRVTISRDNAKNTVYLQMNSLKPEDTAVYYCAADDINNPRRTTTYWGQGTQVTISSDEKLALYLAEVEKQDKYLRQRNKYRFHIIPDGNCLYRAVSKTVYGDQSLHRELREQTVHYIADHLDHFSPLIEGDVGEFIIAAAQDGAWAGYPELLAMGQMLNVNIHLTTGGRLESPTVSTMIHYLGPEDSLRPSIWLSWLSNGHYDAVFDHSYPNPEYDNWCKQTQVQRKRDEELAKSMAISLSKMYIEQNACS

SEQ ID NO: 257 - protein, 834 aa, Artificial Sequence
  Description of Artificial Sequence: Synthetic polypeptide
MVSKGEELFTGVVPILVELDGDVNGHKFSVSGEGEGDATYGKLTLKFICTTGKLPVPWPTLVTTLTWGVQCFSRYPDHMKQHDFFKSAMPEGYVQERTIFFKDDGNYKTRAEVKFEGDTLVNRIELKGIDFKEDGNILGHKLEYNYISHNVYITADKQKNGIKANFKIRHNIEDGSVQLADHYQQNTPIGDGPVLLPDNHYLSTQSALSKDPNEKRDHMVLLEFVTAAGITLGMDELYKGSGATNFSLLKQAGDVEENPGPQVQLQESGGGLAQAGGSLRLSCAASGRMFSINNMGWYRQAPGKQRELVAFITRGGTTTYADSMKGRVTISRDNAKNTVYLQMNSLKPEDTAVYYCAADDINNPRRTTTYWGQGTQVTISSLEVDFKKLKQIKNRMKKTDWLFLNACVGVVEGDLAAIEAYKSSGGDIARQLTADEVRLLNRPSAFDVGYTLVHLAIRFQRQDMLAILLTEVSQQAAKCIPAMVCPELTEQIRREIAASLHQRKGDFACYFLTDLVTFTLPADIEDLPPTVQEKLFDEVLDRDVQKELEEESPIINWSLELATRLDSRLYALWNRTAGDCLLDSVLQATWGIYDKDSVLRKALHDSLHDCSHWFYTRWKDWESWYSQSFGLHFSLREEQWQEDWAFILSLASQPGASLEQTHIFVLAHILRRPIIVYGVKYYKSFRGETLGYTRFQGVYLPLLWEQSFCWKSPIALGYTRGHFSALVAMENDGYGNRGAGANLNTDDDVTITFLPLVDSERKLLHVHFLSAQELGNEEQQEKLLREWLDCCVTEGGVLVAMQKSSRRRNHPLVTQMVEKWLDRYRQIRPCTSLS

SEQ ID NO: 258 - protein, 736 aa, Artificial Sequence
  Description of Artificial Sequence: Synthetic polypeptide
MVSKGEELFTGVVPILVELDGDVNGHKFSVSGEGEGDATYGKLTLKFICTTGKLPVPWPTLVTTLTWGVQCFSRYPDHMKQHDFFKSAMPEGYVQERTIFFKDDGNYKTRAEVKFEGDTLVNRIELKGIDFKEDGNILGHKLEYNYISHNVYITADKQKNGIKANFKIRHNIEDGSVQLADHYQQNTPIGDGPVLLPDNHYLSTQSALSKDPNEKRDHMVLLEFVTAAGITLGMDELYKGSGATNFQVQLQESGGGLAQAGGSLRLSCAASGRMFSINNMGWYRQAPGKQRELVAFITRGGTTTYADSMKGRVTISRDNAKNTVYLQMNSLKPEDTAVYYCAADDINNPRRTTTYWGQGTQVTISSSDDKMAHHTLLLGSGHVGLRNLGNTCFLNAVLQCLSSTRPLRDFCLRRDFRQEVPGGGRAQELTEAFADVIGALWHPDSCEAVNPTRFRAVFQKYVPSFSGYSQQDAQEFLKLLMERLHLEINRRGRRAPPILANGPVPSPPRRGGALLEEPELSDDDRANLMWKRYLEREDSKIVDLFVGQLKSCLKCQACGYRSTTFEVFCDLSLPIPKKGFAGGKVSLRDCFNLFTKEEELESENAPVCDRCRQKTRSTKKLTVQRFPRILVLHLNRFSASRGSIKKSSVGVDFPLQRLSLGDFASDKAGSPVYQLYALCNHSGSVHYGHYTALCRCQTGWHVYNDSRVSPVSENQVASSEGYVLFYQLMQEPPRCL

SEQ ID NO: 259 - protein, 556 aa, Artificial Sequence
  Description of Artificial Sequence: Synthetic polypeptide
MVSKGEELFTGVVPILVELDGDVNGHKFSVSGEGEGDATYGKLTLKFICTTGKLPVPWPTLVTTLTWGVQCFSRYPDHMKQHDFFKSAMPEGYVQERTIFFKDDGNYKTRAEVKFEGDTLVNRIELKGIDFKEDGNILGHKLEYNYISHNVYITADKQKNGIKANFKIRHNIEDGSVQLADHYQQNTPIGDGPVLLPDNHYLSTQSALSKDPNEKRDHMVLLEFVTAAGITLGMDELYKGSGATNFSLLKQAGDVEENPGPQVQLQESGGGLAQAGGSLRLSCAASGRMFSINNMGWYRQAPGKQRELVAFITRGGTTTYADSMKGRVTISRDNAKNTVYLQMNSLKPEDTAVYYCAADDINNPRRTTTYWGQGTQVTISSATPMDAYLRKLGLYRKLVAKDGSCLFRAVAEQVLHSQSRHVEVRMACIHYLRENREKFEAFIEGSFEEYLKRLENPQEWVGQVEISALSLMYRKDFIIYREPNVSPSQVTENNFPEKVLLCFSNGNHYDIVYPIKYKESSAMCQSLLYELLYEKVFKTDVSKIVMELDTLEVADE

SEQ ID NO: 260 - protein, 782 aa, Artificial Sequence
  Description of Artificial Sequence: Synthetic polypeptide
MVSKGEELFTGVVPILVELDGDVNGHKFSVSGEGEGDATYGKLTLKFICTTGKLPVPWPTLVTTLTWGVQCFSRYPDHMKQHDFFKSAMPEGYVQERTIFFKDDGNYKTRAEVKFEGDTLVNRIELKGIDFKEDGNILGHKLEYNYISHNVYITADKQKNGIKANFKIRHNIEDGSVQLADHYQQNTPIGDGPVLLPDNHYLSTQSALSKDPNEKRDHMVLLEFVTAAGITLGMDELYKGSGATNFSLLKQAGDVEENPGPDVQLQASGGGLVQAGGSLRLSCAASGRTFSSYAMGWFRRAPGKEREFVAAISWSGTNTNYADSVKGRFTISRDNAKNTMYLQMNRLAPEDTAVYYCAATSTRTYYYTTSRSNEYVYWGQGTQVTVSSPPSFSEGSGGSRTPEKGFSDREPTRPPRPILQRQDDIVQEKRLSRGISHASSSIVSLARSHVSSNGGGGGSNEHPLEMPICAFQLPDLTVYNEDFRSFIERDLIEQSMLVALEQAGRLNWWVSVDPTSQRLLPLATTGDGNCLLHAASLGMWGFHDRDLMLRKALYALMEKGVEKEALKRRWRWQQTQQNKESGLVYTEDEWQKEWNELIKLASSEPRMHLGTNGANCGGVESSEEPVYESLEEFHVFVLAHVLRRPIVVVADTMLRDSGGEAFAPIPFGGIYLPLEVPASQCHRSPLVLAYDQAHFSALVSMEQKENTKEQAVIPLTDSEYKLLPLHFAVDPGKGWEWGKDDSDNVRLASVILSLEVKLHLLHSYMNVKWIPLSSDAQAPLAQ

SEQ ID NO: 261 - protein, 583 aa, Artificial Sequence
  Description of Artificial Sequence: Synthetic polypeptide
MVSKGEELFTGVVPILVELDGDVNGHKFSVSGEGEGDATYGKLTLKFICTTGKLPVPWPTLVTTLTWGVQCFSRYPDHMKQHDFFKSAMPEGYVQERTIFFKDDGNYKTRAEVKFEGDTLVNRIELKGIDFKEDGNILGHKLEYNYISHNVYITADKQKNGIKANFKIRHNIEDGSVQLADHYQQNTPIGDGPVLLPDNHYLSTQSALSKDPNEKRDHMVLLEFVTAAGITLGMDELYKGSGATNFSLLKQAGDVEENPGPDVQLQASGGGLVQAGGSLRLSCAASGRTFSSYAMGWFRRAPGKEREFVAAISWSGTNTNYADSVKGRFTISRDNAKNTMYLQMNRLAPEDTAVYYCAATSTRTYYYTTSRSNEYVYWGQGTQVTVSSDEKLALYLAEVEKQDKYLRQRNKYRFHIIPDGNCLYRAVSKTVYGDQSLHRELREQTVHYIADHLDHFSPLIEGDVGEFIIAAAQDGAWAGYPELLAMGQMLNVNIHLTTGGRLESPTVSTMIHYLGPEDSLRPSIWLSWLSNGHYDAVFDHSYPNPEYDNWCKQTQVQRKRDEELAKSMAISLSKMYIEQNACS

SEQ ID NO: 262 - protein, 841 aa, Artificial Sequence
  Description of Artificial Sequence: Synthetic polypeptide
MVSKGEELFTGVVPILVELDGDVNGHKFSVSGEGEGDATYGKLTLKFICTTGKLPVPWPTLVTTLTWGVQCFSRYPDHMKQHDFFKSAMPEGYVQERTIFFKDDGNYKTRAEVKFEGDTLVNRIELKGIDFKEDGNILGHKLEYNYISHNVYITADKQKNGIKANFKIRHNIEDGSVQLADHYQQNTPIGDGPVLLPDNHYLSTQSALSKDPNEKRDHMVLLEFVTAAGITLGMDELYKGSGATNFSLLKQAGDVEENPGPDVQLQASGGGLVQAGGSLRLSCAASGRTFSSYAMGWFRRAPGKEREFVAAISWSGTNTNYADSVKGRFTISRDNAKNTMYLQMNRLAPEDTAVYYCAATSTRTYYYTTSRSNEYVYWGQGTQVTVSSLEVDFKKLKQIKNRMKKTDWLFLNACVGVVEGDLAAIEAYKSSGGDIARQLTADEVRLLNRPSAFDVGYTLVHLAIRFQRQDMLAILLTEVSQQAAKCIPAMVCPELTEQIRREIAASLHQRKGDFACYFLTDLVTFTLPADIEDLPPTVQEKLFDEVLDRDVQKELEEESPIINWSLELATRLDSRLYALWNRTAGDCLLDSVLQATWGIYDKDSVLRKALHDSLHDCSHWFYTRWKDWESWYSQSFGLHFSLREEQWQEDWAFILSLASQPGASLEQTHIFVLAHILRRPIIVYGVKYYKSFRGETLGYTRFQGVYLPLLWEQSFCWKSPIALGYTRGHFSALVAMENDGYGNRGAGANLNTDDDVTITFLPLVDSERKLLHVHFLSAQELGNEEQQEKLLREWLDCCVTEGGVLVAMQKSSRRRNHPLVTQMVEKWLDRYRQIRPCTSLS

SEQ ID NO: 263 - protein, 758 aa, Artificial Sequence
  Description of Artificial Sequence: Synthetic polypeptide
MVSKGEELFTGVVPILVELDGDVNGHKFSVSGEGEGDATYGKLTLKFICTTGKLPVPWPTLVTTLTWGVQCFSRYPDHMKQHDFFKSAMPEGYVQERTIFFKDDGNYKTRAEVKFEGDTLVNRIELKGIDFKEDGNILGHKLEYNYISHNVYITADKQKNGIKANFKIRHNIEDGSVQLADHYQQNTPIGDGPVLLPDNHYLSTQSALSKDPNEKRDHMVLLEFVTAAGITLGMDELYKGSGATNFSLLKQAGDVEENPGPDVQLQASGGGLVQAGGSLRLSCAASGRTFSSYAMGWFRRAPGKEREFVAAISWSGTNTNYADSVKGRFTISRDNAKNTMYLQMNRLAPEDTAVYYCAATSTRTYYYTTSRSNEYVYWGQGTQVTVSSSDDKMAHHTLLLGSGHVGLRNLGNTCFLNAVLQCLSSTRPLRDFCLRRDFRQEVPGGGRAQELTEAFADVIGALWHPDSCEAVNPTRFRAVFQKYVPSFSGYSQQDAQEFLKLLMERLHLEINRRGRRAPPILANGPVPSPPRRGGALLEEPELSDDDRANLMWKRYLEREDSKIVDLFVGQLKSCLKCQACGYRSTTFEVFCDLSLPIPKKGFAGGKVSLRDCFNLFTKEEELESENAPVCDRCRQKTRSTKKLTVQRFPRILVLHLNRFSASRGSIKKSSVGVDFPLQRLSLGDFASDKAGSPVYQLYALCNHSGSVHYGHYTALCRCQTGWHVYNDSRVSPVSENQVASSEGYVLFYQLMQEPPRCL

SEQ ID NO: 264 - protein, 563 aa, Artificial Sequence
  Description of Artificial Sequence: Synthetic polypeptide
MVSKGEELFTGVVPILVELDGDVNGHKFSVSGEGEGDATYGKLTLKFICTTGKLPVPWPTLVTTLTWGVQCFSRYPDHMKQHDFFKSAMPEGYVQERTIFFKDDGNYKTRAEVKFEGDTLVNRIELKGIDFKEDGNILGHKLEYNYISHNVYITADKQKNGIKANFKIRHNIEDGSVQLADHYQQNTPIGDGPVLLPDNHYLSTQSALSKDPNEKRDHMVLLEFVTAAGITLGMDELYKGSGATNFSLLKQAGDVEENPGPDVQLQASGGGLVQAGGSLRLSCAASGRTFSSYAMGWFRRAPGKEREFVAAISWSGTNTNYADSVKGRFTISRDNAKNTMYLQMNRLAPEDTAVYYCAATSTRTYYYTTSRSNEYVYWGQGTQVTVSSATPMDAYLRKLGLYRKLVAKDGSCLFRAVAEQVLHSQSRHVEVRMACIHYLRENREKFEAFIEGSFEEYLKRLENPQEWVGQVEISALSLMYRKDFIIYREPNVSPSQVTENNFPEKVLLCFSNGNHYDIVYPIKYKESSAMCQSLLYELLYEKVFKTDVSKIVMELDTLEVADE

SEQ ID NO: 265 - protein, 780 aa, Artificial Sequence
  Description of Artificial Sequence: Synthetic polypeptide
MVSKGEELFTGVVPILVELDGDVNGHKFSVSGEGEGDATYGKLTLKFICTTGKLPVPWPTLVTTLTWGVQCFSRYPDHMKQHDFFKSAMPEGYVQERTIFFKDDGNYKTRAEVKFEGDTLVNRIELKGIDFKEDGNILGHKLEYNYISHNVYITADKQKNGIKANFKIRHNIEDGSVQLADHYQQNTPIGDGPVLLPDNHYLSTQSALSKDPNEKRDHMVLLEFVTAAGITLGMDELYKGSGATNFSLLKQAGDVEENPGPDVQLQASGGGLVQAGGSLRLSCAASGRTNSWYSMGWFRQAPGKEREFVAAISWNGDAIYYTDSVKGRFTISRDNTKNTVYLQMNSLKPEDTAVYICAAHAAAFTEAAHIPGYEYWGQGTQVTVSSPPSFSEGSGGSRTPEKGFSDREPTRPPRPILQRQDDIVQEKRLSRGISHASSSIVSLARSHVSSNGGGGGSNEHPLEMPICAFQLPDLTVYNEDFRSFIERDLIEQSMLVALEQAGRLNWWVSVDPTSQRLLPLATTGDGNCLLHAASLGMWGFHDRDLMLRKALYALMEKGVEKEALKRRWRWQQTQQNKESGLVYTEDEWQKEWNELIKLASSEPRMHLGTNGANCGGVESSEEPVYESLEEFHVFVLAHVLRRPIVVVADTMLRDSGGEAFAPIPFGGIYLPLEVPASQCHRSPLVLAYDQAHFSALVSMEQKENTKEQAVIPLTDSEYKLLPLHFAVDPGKGWEWGKDDSDNVRLASVILSLEVKLHLLHSYMNVKWIPLSSDAQAPLAQ

SEQ ID NO: 266 - protein, 581 aa, Artificial Sequence
  Description of Artificial Sequence: Synthetic polypeptide
MVSKGEELFTGVVPILVELDGDVNGHKFSVSGEGEGDATYGKLTLKFICTTGKLPVPWPTLVTTLTWGVQCFSRYPDHMKQHDFFKSAMPEGYVQERTIFFKDDGNYKTRAEVKFEGDTLVNRIELKGIDFKEDGNILGHKLEYNYISHNVYITADKQKNGIKANFKIRHNIEDGSVQLADHYQQNTPIGDGPVLLPDNHYLSTQSALSKDPNEKRDHMVLLEFVTAAGITLGMDELYKGSGATNFSLLKQAGDVEENPGPDVQLQASGGGLVQAGGSLRLSCAASGRTNSWYSMGWFRQAPGKEREFVAAISWNGDAIYYTDSVKGRFTISRDNTKNTVYLQMNSLKPEDTAVYICAAHAAAFTEAAHIPGYEYWGQGTQVTVSSDEKLALYLAEVEKQDKYLRQRNKYRFHIIPDGNCLYRAVSKTVYGDQSLHRELREQTVHYIADHLDHFSPLIEGDVGEFIIAAAQDGAWAGYPELLAMGQMLNVNIHLTTGGRLESPTVSTMIHYLGPEDSLRPSIWLSWLSNGHYDAVFDHSYPNPEYDNWCKQTQVQRKRDEELAKSMAISLSKMYIEQNACS

SEQ ID NO: 267 - protein, 839 aa, Artificial Sequence
  Description of Artificial Sequence: Synthetic polypeptide
MVSKGEELFTGVVPILVELDGDVNGHKFSVSGEGEGDATYGKLTLKFICTTGKLPVPWPTLVTTLTWGVQCFSRYPDHMKQHDFFKSAMPEGYVQERTIFFKDDGNYKTRAEVKFEGDTLVNRIELKGIDFKEDGNILGHKLEYNYISHNVYITADKQKNGIKANFKIRHNIEDGSVQLADHYQQNTPIGDGPVLLPDNHYLSTQSALSKDPNEKRDHMVLLEFVTAAGITLGMDELYKGSGATNFSLLKQAGDVEENPGPDVQLQASGGGLVQAGGSLRLSCAASGRTNSWYSMGWFRQAPGKEREFVAAISWNGDAIYYTDSVKGRFTISRDNTKNTVYLQMNSLKPEDTAVYICAAHAAAFTEAAHIPGYEYWGQGTQVTVSSLEVDFKKLKQIKNRMKKTDWLFLNACVGVVEGDLAAIEAYKSSGGDIARQLTADEVRLLNRPSAFDVGYTLVHLAIRFQRQDMLAILLTEVSQQAAKCIPAMVCPELTEQIRREIAASLHQRKGDFACYFLTDLVTFTLPADIEDLPPTVQEKLFDEVLDRDVQKELEEESPIINWSLELATRLDSRLYALWNRTAGDCLLDSVLQATWGIYDKDSVLRKALHDSLHDCSHWFYTRWKDWESWYSQSFGLHFSLREEQWQEDWAFILSLASQPGASLEQTHIFVLAHILRRPIIVYGVKYYKSFRGETLGYTRFQGVYLPLLWEQSFCWKSPIALGYTRGHFSALVAMENDGYGNRGAGANLNTDDDVTITFLPLVDSERKLLHVHFLSAQELGNEEQQEKLLREWLDCCVTEGGVLVAMQKSSRRRNHPLVTQMVEKWLDRYRQIRPCTSLS

SEQ ID NO: 268 - protein, 756 aa, Artificial Sequence
  Description of Artificial Sequence: Synthetic polypeptide
MVSKGEELFTGVVPILVELDGDVNGHKFSVSGEGEGDATYGKLTLKFICTTGKLPVPWPTLVTTLTWGVQCFSRYPDHMKQHDFFKSAMPEGYVQERTIFFKDDGNYKTRAEVKFEGDTLVNRIELKGIDFKEDGNILGHKLEYNYISHNVYITADKQKNGIKANFKIRHNIEDGSVQLADHYQQNTPIGDGPVLLPDNHYLSTQSALSKDPNEKRDHMVLLEFVTAAGITLGMDELYKGSGATNFSLLKQAGDVEENPGPDVQLQASGGGLVQAGGSLRLSCAASGRTNSWYSMGWFRQAPGKEREFVAAISWNGDAIYYTDSVKGRFTISRDNTKNTVYLQMNSLKPEDTAVYICAAHAAAFTEAAHIPGYEYWGQGTQVTVSSSDDKMAHHTLLLGSGHVGLRNLGNTCFLNAVLQCLSSTRPLRDFCLRRDFRQEVPGGGRAQELTEAFADVIGALWHPDSCEAVNPTRFRAVFQKYVPSFSGYSQQDAQEFLKLLMERLHLEINRRGRRAPPILANGPVPSPPRRGGALLEEPELSDDDRANLMWKRYLEREDSKIVDLFVGQLKSCLKCQACGYRSTTFEVFCDLSLPIPKKGFAGGKVSLRDCFNLFTKEEELESENAPVCDRCRQKTRSTKKLTVQRFPRILVLHLNRFSASRGSIKKSSVGVDFPLQRLSLGDFASDKAGSPVYQLYALCNHSGSVHYGHYTALCRCQTGWHVYNDSRVSPVSENQVASSEGYVLFYQLMQEPPRCL

SEQ ID NO: 269 - protein, 561 aa, Artificial Sequence
  Description of Artificial Sequence: Synthetic polypeptide
MVSKGEELFTGVVPILVELDGDVNGHKFSVSGEGEGDATYGKLTLKFICTTGKLPVPWPTLVTTLTWGVQCFSRYPDHMKQHDFFKSAMPEGYVQERTIFFKDDGNYKTRAEVKFEGDTLVNRIELKGIDFKEDGNILGHKLEYNYISHNVYITADKQKNGIKANFKIRHNIEDGSVQLADHYQQNTPIGDGPVLLPDNHYLSTQSALSKDPNEKRDHMVLLEFVTAAGITLGMDELYKGSGATNFSLLKQAGDVEENPGPDVQLQASGGGLVQAGGSLRLSCAASGRTNSWYSMGWFRQAPGKEREFVAAISWNGDAIYYTDSVKGRFTISRDNTKNTVYLQMNSLKPEDTAVYICAAHAAAFTEAAHIPGYEYWGQGTQVTVSSATPMDAYLRKLGLYRKLVAKDGSCLFRAVAEQVLHSQSRHVEVRMACIHYLRENREKFEAFIEGSFEEYLKRLENPQEWVGQVEISALSLMYRKDFIIYREPNVSPSQVTENNFPEKVLLCFSNGNHYDIVYPIKYKESSAMCQSLLYELLYEKVFKTDVSKIVMELDTLEVADE

SEQ ID NO: 270 - protein, 394 aa, Homo sapiens; identical to SEQ ID NO: 237

SEQ ID NO: 271 - protein, 97 aa, Homo sapiens
MALPLRPLTRGLASAAKGGHGGAGARTWRLLTFVLALPSVALCTFNSYLHSGHRPRPEFRPYQHLRIRTKPYPWGDGNHTLFHNSHVNPLPTGYEHP

SEQ ID NO: 272 - protein, 126 aa, Homo sapiens
MAASRYRRFLKLCEEWPVDETKRGRDLGAYLRQRVAQAFREGENTQVAEPEACDQMYESLARLHSNYYKHKYPRPRDTSFSGLSLEEYKLILSTDTLEELKEIDKGMWKKLQEKFAPKGPEEDHKA

SEQ ID NO: 273 - protein, 104 aa, Homo sapiens
MGRAVKVLQLFKTLHRTRQQVFKNDARALEAARIKINEEFKNNKSETSSKKIEELMKIGSDVELLLRTSVIQGIHTDHNTLKLVPRKDLLVENVPYCDAPTQKQ

SEQ ID NO: 274 - skipped

SEQ ID NO: 275 - protein, 87 aa, Artificial Sequence
  Description of Artificial Sequence: Synthetic polypeptide
MWRLRRAAVACEVCQSLVKHSSGIKGSLPLQKLHLVSRSIYHSHHPTLKLQRPQLRTSFQQFSSLTNLPLRKLKFSPIKYGYQPRRN

SEQ ID NO: 276 - protein, 41 aa, Artificial Sequence
  Description of Artificial Sequence: Synthetic polypeptide
MWTLGRRAVAGLLASPSPAQAQTLTRVPRPAELAPLCGRRG

SEQ ID NO: 277 - protein, 13 aa, Artificial Sequence
  Description of Artificial Sequence: Synthetic peptide
MALPLRPLTRGLA

SEQ ID NO: 278 - protein, 13 aa, Artificial Sequence
  Description of Artificial Sequence: Synthetic peptide
MAASRYRRFLKLC

SEQ ID NO: 279 - protein, 25 aa, Artificial Sequence
  Description of Artificial Sequence: Synthetic peptide
GGGGSGGGGSGGGGSGGGGSGGGGS

SEQ ID NO: 280 - protein, 20 aa, Artificial Sequence
  Description of Artificial Sequence: Synthetic peptide
GGGGSGGGGSGGGGSGGGGS

SEQ ID NO: 281 - protein, 15 aa, Artificial Sequence
  Description of Artificial Sequence: Synthetic peptide
GGGGSGGGGSGGGGS

SEQ ID NO: 282 - protein, 10 aa, Artificial Sequence
  Description of Artificial Sequence: Synthetic peptide
GGGGSGGGGS

SEQ ID NO: 283 - protein, 5 aa, Artificial Sequence
  Description of Artificial Sequence: Synthetic peptide
GGGGS

SEQ ID NO: 284 - protein, 16 aa, Artificial Sequence
  Description of Artificial Sequence: Synthetic peptide
SGGGGSGGGGSGGGGS

SEQ ID NO: 285 - protein, 15 aa, Artificial Sequence
  Description of Artificial Sequence: Synthetic peptide
SGGGGSGGGGSGGGG

SEQ ID NO: 286 - protein, 10 aa, Artificial Sequence
  Description of Artificial Sequence: Synthetic peptide
SGGGGSGGGG

SEQ ID NO: 287 - protein, 5 aa, Artificial Sequence
  Description of Artificial Sequence: Synthetic peptide
SGGGG

SEQ ID NO: 288 - protein, 5 aa, Artificial Sequence
  Description of Artificial Sequence: Synthetic peptide
GGSGG

SEQ ID NO: 289 - protein, 30 aa, Artificial Sequence
  Description of Artificial Sequence: Synthetic polypeptide
AHFKISGEKRPSTDPGKKAKNPKKKKKKDP

SEQ ID NO: 290 - protein, 12 aa, Artificial Sequence
  Description of Artificial Sequence: Synthetic peptide
AHRAKKMSKTHA

SEQ ID NO: 291 - protein, 14 aa, Artificial Sequence
  Description of Artificial Sequence: Synthetic peptide
ASPEYVNLPINGNG

SEQ ID NO: 292 - protein, 7 aa, Artificial Sequence
  Description of Artificial Sequence: Synthetic peptide
CTKRPRW

SEQ ID NO: 293 - protein, 16 aa, Artificial Sequence
  Description of Artificial Sequence: Synthetic peptide
DKAKRVSRNKSEKKRR

SEQ ID NO: 294 - protein, 15 aa, Artificial Sequence
  Description of Artificial Sequence: Synthetic peptide
EELRLKEELLKGIYA

SEQ ID NO: 295 - protein, 16 aa, Artificial Sequence
  Description of Artificial Sequence: Synthetic peptide
EEQLRRRKNSRLNNTG

SEQ ID NO: 296 - protein, 24 aa, Artificial Sequence
  Description of Artificial Sequence: Synthetic peptide
EVLKVIRTGKRKKKAWKRMVTKVC

SEQ ID NO: 297 - protein, 15 aa, Artificial Sequence
  Description of Artificial Sequence: Synthetic peptide
HHHHHHHHHHHHQPH

SEQ ID NO: 298 - protein, 17 aa, Artificial Sequence
  Description of Artificial Sequence: Synthetic peptide
HKKKHPDASVNFSEFSK

SEQ ID NO: 299 - protein, 9 aa, Artificial Sequence
  Description of Artificial Sequence: Synthetic peptide
HKRTKKNLS

SEQ ID NO: 300 - protein, 29 aa, Artificial Sequence
  Description of Artificial Sequence: Synthetic peptide
IINGRKLKLKKSRRRSSQTSNNSFTSRRS

SEQ ID NO: 301 - protein, 8 aa, Artificial Sequence
  Description of Artificial Sequence: Synthetic peptide
KAEQERRK

SEQ ID NO: 302 - protein, 18 aa, Artificial Sequence
  Description of Artificial Sequence: Synthetic peptide
KEKRKRREELFIEQKKRK

SEQ ID NO: 303 - protein, 14 aa, Artificial Sequence
  Description of Artificial Sequence: Synthetic peptide
KKGKDEWFSRGKKP

SEQ ID NO: 304 - protein, 15 aa, Artificial Sequence
  Description of Artificial Sequence: Synthetic peptide
KKGPSVQKRKKTNLS

SEQ ID NO: 305 - protein, 16 aa, Artificial Sequence
  Description of Artificial Sequence: Synthetic peptide
KKKTVINDLLHYKKEK

SEQ ID NO: 306 - protein, 17 aa, Artificial Sequence
  Description of Artificial Sequence: Synthetic peptide
KKNGGKGKNKPSAKIKK

SEQ ID NO: 307 - protein, 13 aa, Artificial Sequence
  Description of Artificial Sequence: Synthetic peptide
KKPKWDDFKKKKK

SEQ ID NO: 308 - protein, 9 aa, Artificial Sequence
  Description of Artificial Sequence: Synthetic peptide
KKRKKDNLS

SEQ ID NO: 309 - protein, 9 aa, Artificial Sequence
  Description of Artificial Sequence: Synthetic peptide
KKRRKRRRK

SEQ ID NO: 310 - protein, 9 aa, Artificial Sequence
  Description of Artificial Sequence: Synthetic peptide
KKRRRRARK

SEQ ID NO: 311 - protein, 7 aa, Artificial Sequence
  Description of Artificial Sequence: Synthetic peptide
KKSKRGR

SEQ ID NO: 312 - protein, 8 aa, Artificial Sequence
  Description of Artificial Sequence: Synthetic peptide
KKSRKRGS

SEQ ID NO: 313 - protein, 17 aa, Artificial Sequence
  Description of Artificial Sequence: Synthetic peptide
KKSTALSRELGKIMRRR

SEQ ID NO: 314 - protein, 17 aa, Artificial Sequence
  Description of Artificial Sequence: Synthetic peptide
KKSYQDPEIIAHSRPRK

SEQ ID NO: 315 - protein, 17 aa, Artificial Sequence
  Description of Artificial Sequence: Synthetic peptide
KKTGKNRKLKSKRVKTR

SEQ ID NO: 316 - protein, 17 aa, Artificial Sequence
  Description of Artificial Sequence: Synthetic peptide
KKVSIAGQSGKLWRWKR

SEQ ID NO: 317 - protein, 20 aa, Artificial Sequence
  Description of Artificial Sequence: Synthetic peptide
KKYENVVIKRSPRKRGRPRK

SEQ ID NO: 318 - protein, 6 aa, Artificial Sequence
  Description of Artificial Sequence: Synthetic peptide
KNKKRK

SEQ ID NO: 319 - protein, 6 aa, Artificial Sequence
  Description of Artificial Sequence: Synthetic peptide
KPKKKR

SEQ ID NO: 320 - protein, 19 aa, Artificial Sequence
  Description of Artificial Sequence: Synthetic peptide
KRAMKDDSHGNSTSPKRRK

SEQ ID NO: 321 - protein, 17 aa, Artificial Sequence
  Description of Artificial Sequence: Synthetic peptide
KRANSNLVAAYEKAKKK

SEQ ID NO: 322 - protein, 22 aa, Artificial Sequence
  Description of Artificial Sequence: Synthetic peptide
KRASEDTTSGSPPKKSSAGPKR

SEQ ID NO: 323 - protein, 16 aa, Artificial Sequence
  Description of Artificial Sequence: Synthetic peptide
KRFKRRWMVRKMKTKK

SEQ ID NO: 324 - protein, 16 aa, Artificial Sequence
  Description of Artificial Sequence: Synthetic peptide
KRGLNSSFETSPKKVK

SEQ ID NO: 325 - protein, 20 aa, Artificial Sequence
  Description of Artificial Sequence: Synthetic peptide
KRGNSSIGPNDLSKRKQRKK

SEQ ID NO: 326 - protein, 23 aa, Artificial Sequence
  Description of Artificial Sequence: Synthetic peptide
KRIHSVSLSQSQIDPSKKVKRAK

SEQ ID NO: 327 - protein, 15 aa, Artificial Sequence
  Description of Artificial Sequence: Synthetic peptide
KRKGKLKNKGSKRKK

SEQ ID NO: 328 - protein, 13 aa, Artificial Sequence
  Description of Artificial Sequence: Synthetic peptide
KRRRRRRREKRKR

SEQ ID NO: 329 - protein, 18 aa, Artificial Sequence
  Description of Artificial Sequence: Synthetic peptide
KRSNDRTYSPEEEKQRRA

SEQ ID NO: 330 - protein, 21 aa, Artificial Sequence
  Description of Artificial Sequence: Synthetic peptide
KRTVATNGDASGAHRAKKMSK

SEQ ID NO: 331 - protein, 20 aa, Artificial Sequence
  Description of Artificial Sequence: Synthetic peptide
KRVYNKGEDEQEHLPKGKKR

SEQ ID NO: 332 - protein, 18 aa, Artificial Sequence
  Description of Artificial Sequence: Synthetic peptide
KSGKAPRRRAVSMDNSNK

SEQ ID NO: 333 - protein, 19 aa, Artificial Sequence
  Description of Artificial Sequence: Synthetic peptide
KVNFLDMSLDDIIIYKELE

SEQ ID NO: 334 - protein, 15 aa, Artificial Sequence
  Description of Artificial Sequence: Synthetic peptide
KVQHRIAKKTTRRRR

SEQ ID NO: 335 - protein, 8 aa, Artificial Sequence
  Description of Artificial Sequence: Synthetic peptide
LSPSLSPL

SEQ ID NO: 336 - protein, 30 aa, Artificial Sequence
  Description of Artificial Sequence: Synthetic polypeptide
MDSLLMNRRKFLYQFKNVRWAKGRRETYLC

SEQ ID NO: 337 - protein, 52 aa, Artificial Sequence
  Description of Artificial Sequence: Synthetic polypeptide
MPQNEYIELHRKRYGYRLDYHEKKRKKESREAHERSKKAKKMIGLKAKLYHK

SEQ ID NO: 338 - protein, 10 aa, Artificial Sequence
  Description of Artificial Sequence: Synthetic peptide
MVQLRPRASR

SEQ ID NO: 339 - protein, 24 aa, Artificial Sequence
  Description of Artificial Sequence: Synthetic peptide
NNKLLAKRRKGGASPKDDPMDDIK

SEQ ID NO: 340 - protein, 20 aa, Artificial Sequence
  Description of Artificial Sequence: Synthetic peptide
NYKRPMDGTYGPPAKRHEGE

SEQ ID NO: 341 - protein, 19 aa, Artificial Sequence
  Description of Artificial Sequence: Synthetic peptide
PDTKRAKLDSSETTMVKKK

SEQ ID NO: 342 - protein, 7 aa, Artificial Sequence
  Description of Artificial Sequence: Synthetic peptide
PEKRTKI

SEQ ID NO: 343 - protein, 8 aa, Artificial Sequence
  Description of Artificial Sequence: Synthetic peptide
PGGRGKKK

SEQ ID NO: 344 - protein, 18 aa, Artificial Sequence
  Description of Artificial Sequence: Synthetic peptide
PGKMDKGEHRQERRDRPY

SEQ ID NO: 345 - protein, 11 aa, Artificial Sequence
  Description of Artificial Sequence: Synthetic peptide
PKKGDKYDKTD

SEQ ID NO: 346 - protein, 7 aa, Artificial Sequence
  Description of Artificial Sequence: Synthetic peptide
PKKKSRK

SEQ ID NO: 347 - protein, 7 aa, Artificial Sequence
  Description of Artificial Sequence: Synthetic peptide
PKKNKPE

SEQ ID NO: 348 - protein, 7 aa, Artificial Sequence
  Description of Artificial Sequence: Synthetic peptide
PKKRAKV

SEQ ID NO: 349 - protein, 9 aa, Artificial Sequence
  Description of Artificial Sequence: Synthetic peptide
PKPKKLKVE

SEQ ID NO: 350 - protein, 7 aa, Artificial Sequence
  Description of Artificial Sequence: Synthetic peptide
PKRGRGR

SEQ ID NO: 351 - protein, 9 aa, Artificial Sequence
  Description of Artificial Sequence: Synthetic peptide
PKRRLVDDA

SEQ ID NO: 352 - protein, 7 aa, Artificial Sequence
  Description of Artificial Sequence: Synthetic peptide
PKRRRTY

SEQ ID NO: 353 - protein, 6 aa, Artificial Sequence
  Description of Artificial Sequence: Synthetic peptide
PLFKRR

SEQ ID NO: 354 - protein, 7 aa, Artificial Sequence
  Description of Artificial Sequence: Synthetic peptide
PLRKAKR

SEQ ID NO: 355 - protein, 9 aa, Artificial Sequence
  Description of Artificial Sequence: Synthetic peptide
PPAKRKCIF

SEQ ID NO: 356 - protein, 8 aa, Artificial Sequence
  Description of Artificial Sequence: Synthetic peptide
PPARRRRL

SEQ ID NO: 357 - protein, 8 aa, Artificial Sequence
  Description of Artificial Sequence: Synthetic peptide
PPKKKRKV

SEQ ID NO: 358 - protein, 10 aa, Artificial Sequence
  Description of Artificial Sequence: Synthetic peptide
PPNKRMKVKH

SEQ ID NO: 359 - protein, 13 aa, Artificial Sequence
  Description of Artificial Sequence: Synthetic peptide
PPRIYPQLPSAPT

SEQ ID NO: 360 - protein, 13 aa, Artificial Sequence
  Description of Artificial Sequence: Synthetic peptide
PQRSPFPKSSVKR

SEQ ID NO: 361 - protein, 8 aa, Artificial Sequence
  Description of Artificial Sequence: Synthetic peptide
PRPRKVPR

SEQ ID NO: 362 - protein, 9 aa, Artificial Sequence
  Description of Artificial Sequence: Synthetic peptide
PRRRVQRKR

SEQ ID NO: 363 - protein, 7 aa, Artificial Sequence
  Description of Artificial Sequence: Synthetic peptide
PRRVRLK

SEQ ID NO: 364 - protein, 7 aa, Artificial Sequence
  Description of Artificial Sequence: Synthetic peptide
PSRKRPR

SEQ ID NO: 365 - protein, 8 aa, Artificial Sequence
  Description of Artificial Sequence: Synthetic peptide
PSSKKRKV

SEQ ID NO: 366 - protein, 7 aa, Artificial Sequence
  Description of Artificial Sequence: Synthetic peptide
PTKKRVK

SEQ ID NO: 367 - protein, 9 aa, Artificial Sequence
  Description of Artificial Sequence: Synthetic peptide
QRPGPYDRP

SEQ ID NO: 368 - protein, 18 aa, Artificial Sequence
  Description of Artificial Sequence: Synthetic peptide
RGKGGKGLGKGGAKRHRK

SEQ ID NO: 369 - protein, 24 aa, Artificial Sequence
  Description of Artificial Sequence: Synthetic peptide
RKAGKGGGGHKTTKKRSAKDEKVP

SEQ ID NO: 370 - protein, 9 aa, Artificial Sequence
  Description of Artificial Sequence: Synthetic peptide
RKIKLKRAK

SEQ ID NO: 371 - protein, 9 aa, Artificial Sequence
  Description of Artificial Sequence: Synthetic peptide
RKIKRKRAK

SEQ ID NO: 372 - protein, 17 aa, Artificial Sequence
  Description of Artificial Sequence: Synthetic peptide
RKKEAPGPREELRSRGR

SEQ ID NO: 373 - protein, 7 aa, Artificial Sequence
  Description of Artificial Sequence: Synthetic peptide
RKKRKGK

SEQ ID NO: 374 - protein, 9 aa, Artificial Sequence
  Description of Artificial Sequence: Synthetic peptide
RKKRRQRRR

SEQ ID NO: 375 - protein, 25 aa, Artificial Sequence
  Description of Artificial Sequence: Synthetic peptide
RKKSIPLSIKNLKRKHKRKKNKITR

SEQ ID NO: 376 - protein, 20 aa, Artificial Sequence
  Description of Artificial Sequence: Synthetic peptide
RKLVKPKNTKMKTKLRTNPY

SEQ ID NO: 377 - protein, 16 aa, Artificial Sequence
  Description of Artificial Sequence: Synthetic peptide
RKRLILSDKGQLDWKK

SEQ ID NO: 378 - protein, 7 aa, Artificial Sequence
  Description of Artificial Sequence: Synthetic peptide
RKRLKSK

SEQ ID NO: 379 - protein, 9 aa, Artificial Sequence
  Description of Artificial Sequence: Synthetic peptide
RKRRVRDNM

SEQ ID NO: 380 - protein, 22 aa, Artificial Sequence
  Description of Artificial Sequence: Synthetic peptide
RKRSPKDKKEKDLDGAGKRRKT

SEQ ID NO: 381 - protein, 22 aa, Artificial Sequence
  Description of Artificial Sequence: Synthetic peptide
RKRTPRVDGQTGENDMNKRRRK

SEQ ID NO: 382 - protein, 10 aa, Artificial Sequence
  Description of Artificial Sequence: Synthetic peptide
RLPVRRRRRR

SEQ ID NO: 383 - protein, 10 aa, Artificial Sequence
  Description of Artificial Sequence: Synthetic peptide
RLRFRKPKSK

SEQ ID NO: 384 - protein, 6 aa, Artificial Sequence
  Description of Artificial Sequence: Synthetic peptide
RQQRKR

SEQ ID NO: 385 - protein, 16 aa, Artificial Sequence
  Description of Artificial Sequence: Synthetic peptide
RRDLNSSFETSPKKVK

SEQ ID NO: 386 - protein, 8 aa, Artificial Sequence
  Description of Artificial Sequence: Synthetic peptide
RRDRAKLR

SEQ ID NO: 387 - protein, 8 aa, Artificial Sequence
  Description of Artificial Sequence: Synthetic peptide
RRGDGRRR

SEQ ID NO: 388 - protein, 11 aa, Artificial Sequence
  Description of Artificial Sequence: Synthetic peptide
RRGRKRKAEKQ

SEQ ID NO: 389 - protein, 6 aa, Artificial Sequence
  Description of Artificial Sequence: Synthetic peptide
RRKKRR

SEQ ID NO: 390 - protein, 19 aa, Artificial Sequence
  Description of Artificial Sequence: Synthetic peptide
RRKRSKSEDMDSVESKRRR

SEQ ID NO: 391 - protein, 6 aa, Artificial Sequence
  Description of Artificial Sequence: Synthetic peptide
RRKRSR

SEQ ID NO: 392 - protein, 14 aa, Artificial Sequence
  Description of Artificial Sequence: Synthetic peptide
RRPKGKTLQKRKPK

SEQ ID NO: 393 - protein, 18 aa, Artificial Sequence
  Description of Artificial Sequence: Synthetic peptide
RRRGFERFGPDNMGRKRK

SEQ ID NO: 394 - protein, 15 aa, Artificial Sequence
  Description of Artificial Sequence: Synthetic peptide
RRRGKNKVAAQNCRK

SEQ ID NO: 395 - protein, 9 aa, Artificial Sequence
  Description of Artificial Sequence: Synthetic peptide
RRRKRRNLS

SEQ ID NO: 396 - protein, 14 aa, Artificial Sequence
  Description of Artificial Sequence: Synthetic peptide
RRRQKQKGGASRRR

SEQ ID NO: 397 - protein, 13 aa, Artificial Sequence
  Description of Artificial Sequence: Synthetic peptide
RRRREGPRARRRR

SEQ ID NO: 398 - protein, 61 aa, Artificial Sequence
  Description of Artificial Sequence: Synthetic polypeptide
RRTIRLKLVYDKCDRSCKIQKKNRNKCQYCRFHKCLSVGMSHNAIRFGRMPRSEKAKLKAE

SEQ ID NO: 399 - protein, 17 aa, Artificial Sequence
  Description of Artificial Sequence: Synthetic peptide
RRVPQRKEVSRCRKCRK

SEQ ID NO: 400 - protein, 32 aa, Artificial Sequence
  Description of Artificial Sequence: Synthetic polypeptide
RVGGRRQAVECIEDLLNEPGQPLDLSCKRPRP

SEQ ID NO: 401 - protein, 9 aa, Artificial Sequence
  Description of Artificial Sequence: Synthetic peptide
RVVKLRIAP

SEQ ID NO: 402 - protein, 6 aa, Artificial Sequence
  Description of Artificial Sequence: Synthetic peptide
RVVRRR

SEQ ID NO: 403 - protein, 12 aa, Artificial Sequence
  Description of Artificial Sequence: Synthetic peptide
SKRKTKISRKTR

SEQ ID NO: 404 - protein, 16 aa, Artificial Sequence
  Description of Artificial Sequence: Synthetic peptide
SYVKTVPNRTRTYIKL

SEQ ID NO: 405 - protein, 12 aa, Artificial Sequence
  Description of Artificial Sequence: Synthetic peptide
TGKNEAKKRKIA

SEQ ID NO: 406 - protein, 30 aa, Artificial Sequence
  Description of Artificial Sequence: Synthetic polypeptide
TLSPASSPSSVSCPVIPASTDESPGSALNI

SEQ ID NO: 407 - protein, 170 aa, Artificial Sequence
  Description of Artificial Sequence: Synthetic polypeptide
VFTLEDFVGDWRQTAGYNLDQVLEQGGVSSLFQNLGVSVTPIQRIVLSGENGLKIDIHVIIPYEGLSGDQMGQIEKIFKVVYPVDDHHFKVILHYGTLVIDGVTPNMIDYFGRPYEGIAVFDGKKITVTGTLWNGNKIIDERLINPDGSLLFRVTINGVTGWRLCERILA

SEQ ID NO: 408 - protein, 554 aa, Artificial Sequence
  Description of Artificial Sequence: Synthetic polypeptide
MEDAKNIKKGPAPFYPLEDGTAGEQLHKAMKRYALVPGTIAFTDAHIEVDITYAEYFEMSVRLAEAMKRYGLNTNHRIVVCSENSLQFFMPVLGALFIGVAVAPANDIYNERELLNSMGISQPTVVFVSKKGLQKILNVQKKLPIIQKIIIMDSKTDYQGFQSMYTFVTSHLPPGFNEYDFVPESFDRDKTIALIMNSSGSTGLPKGVALPHRTACVRFSHARDPIFGNQIIPDTAILSVVPFHHGFGMFTTLGYLICGFRVVLMYRFEEELFLRSLQDYKIQSALLVPTLFSFFAKSTLIDKYDLSNLHEIASGGAPLSKEVGEAVAKRFHLPGIRQGYGLTETTSAILITPEGDDKPGAVGKVVPFFEAKVVDLDTGKTLGVNQRGELCVRGPMIMSGYVNNPEATNALIDKDGWLHSGDIAYWDEDEHFFIVDRLKSLIKYKGYQVAPAELESILLQHPNIFDAGVAGLPDDDAGELPAAVVVLEHGKTMTEKEIVDYVASQVTTAKKLRGGVVFVDEVPKGLTGKLDARKIREILIKAKKGGKIAVTRLK

SEQ ID NO: 409 - protein, 15 aa, Artificial Sequence
  Description of Artificial Sequence: Synthetic peptide
PSRLEEELRRRLTEP

SEQ ID NO: 410 - protein, 22 aa, Artificial Sequence
  Description of Artificial Sequence: Synthetic peptide
GSGATNFSLLKQAGDVEENPGP

SEQ ID NO: 411 - protein, 394 aa, Artificial Sequence; identical to SEQ ID NO: 237
  Description of Artificial Sequence: Synthetic polypeptide

SEQ ID NO: 412 - protein, 290 aa, Artificial Sequence
  Description of Artificial Sequence: Synthetic polypeptide
MALPLRPLTRGLASAAKGGHGGAGARTWRLLTFVLALPSVALCTFNSYLHSGHRPRPEFRPYQHLRIRTKPYPWGDGNHTLFHNSHVNPLPTGYEHPKVPVFTLEDFVGDWRQTAGYNLDQVLEQGGVSSLFQNLGVSVTPIQRIVLSGENGLKIDIHVIIPYEGLSGDQMGQIEKIFKVVYPVDDHHFKVILHYGTLVIDGVTPNMIDYFGRPYEGIAVFDGKKITVTGTLWNGNKIIDERLINPDGSLLFRVTINGVTGWRLCERILAGGGGSPSRLEEELRRRLTEP

SEQ ID NO: 413 - protein, 294 aa, Artificial Sequence
  Description of Artificial Sequence: Synthetic polypeptide
MAASRYRRFLKLCEEWPVDETKRGRDLGAYLRQRVAQAFREGENTQYPRPRDTSFSGLSLEEYKLILSTDTLEELKEIDKGMWKKLQEKFAPKGPEEDHKAKVPVFTLEDFVGDWRQTAGYNLDQVLEQGGVSSLFQNLGVSVTPIQRIVLSGENGLKIDIHVIIPYEGLSGDQMGQIEKIFKVVYPVDDHHFKVILHYGTLVIDGVTPNMIDYFGRPYEGIAVFDGKKITVTGTLWNGNKIIDERLINPDGSLLFRVTINGVTGWRLCERILAGGGGSPSRLEEELRRRLTEP

SEQ ID NO: 414 - protein, 297 aa, Artificial Sequence
  Description of Artificial Sequence: Synthetic polypeptide
MGRAVKVLQLFKTLHRTRQQVFKNDARALEAARIKINEEFKNNKSETSSKKIEELMKIGSDVELLLRTSVIQGIHTDHNTLKLVPRKDLLVENVPYCDAPTQKQKVPVFTLEDFVGDWRQTAGYNLDQVLEQGGVSSLFQNLGVSVTPIQRIVLSGENGLKIDIHVIIPYEGLSGDQMGQIEKIFKVVYPVDDHHFKVILHYGTLVIDGVTPNMIDYFGRPYEGIAVFDGKKITVTGTLWNGNKIIDERLINPDGSLLFRVTINGVTGWRLCERILAGGGGSPSRLEEELRRRLTEP

SEQ ID NO: 415 - protein, 706 aa, Artificial Sequence
  Description of Artificial Sequence: Synthetic polypeptide
MEDAKNIKKGPAPFYPLEDGTAGEQLHKAMKRYALVPGTIAFTDAHIEVDITYAEYFEMSVRLAEAMKRYGLNTNHRIVVCSENSLQFFMPVLGALFIGVAVAPANDIYNERELLNSMGISQPTVVFVSKKGLQKILNVQKKLPIIQKIIIMDSKTDYQGFQSMYTFVTSHLPPGFNEYDFVPESFDRDKTIALIMNSSGSTGLPKGVALPHRTACVRFSHARDPIFGNQIIPDTAILSVVPFHHGFGMFTTLGYLICGFRVVLMYRFEEELFLRSLQDYKIQSALLVPTLFSFFAKSTLIDKYDLSNLHEIASGGAPLSKEVGEAVAKRFHLPGIRQGYGLTETTSAILITPEGDDKPGAVGKVVPFFEAKVVDLDTGKTLGVNQRGELCVRGPMIMSGYVNNPEATNALIDKDGWLHSGDIAYWDEDEHFFIVDRLKSLIKYKGYQVAPAELESILLQHPNIFDAGVAGLPDDDAGELPAAVVVLEHGKTMTEKEIVDYVASQVTTAKKLRGGVVFVDEVPKGLTGKLDARKIREILIKAKKGGKIAVTRLKGSGATNFSLLKQAGDVEENPGPRSGTGSSGEVQLQESGGGLVQPGGSLRLSCTASGVTISALNAMAMGWYRQAPGERRVMVAAVSERGNAMYRESVQGRFTVTRDFTNKMVSLQMDNLKPEDTAVYYCHVLEDRVDSFHDYWGQGTQVTVSS

SEQ ID NO: 416 - protein, 976 aa, Artificial Sequence
  Description of Artificial Sequence: Synthetic polypeptide
MEDAKNIKKGPAPFYPLEDGTAGEQLHKAMKRYALVPGTIAFTDAHIEVDITYAEYFEMSVRLAEAMKRYGLNTNHRIVVCSENSLQFFMPVLGALFIGVAVAPANDIYNERELLNSMGISQPTVVFVSKKGLQKILNVQKKLPIIQKIIIMDSKTDYQGFQSMYTFVTSHLPPGFNEYDFVPESFDRDKTIALIMNSSGSTGLPKGVALPHRTACVRFSHARDPIFGNQIIPDTAILSVVPFHHGFGMFTTLGYLICGFRVVLMYRFEEELFLRSLQDYKIQSALLVPTLFSFFAKSTLIDKYDLSNLHEIASGGAPLSKEVGEAVAKRFHLPGIRQGYGLTETTSAILITPEGDDKPGAVGKVVPFFEAKVVDLDTGKTLGVNQRGELCVRGPMIMSGYVNNPEATNALIDKDGWLHSGDIAYWDEDEHFFIVDRLKSLIKYKGYQVAPAELESILLQHPNIFDAGVAGLPDDDAGELPAAVVVLEHGKTMTEKEIVDYVASQVTTAKKLRGGVVFVDEVPKGLTGKLDARKIREILIKAKKGGKIAVTRLKGSGATNFSLLKQAGDVEENPGPRSGTGSPPSFSEGSGGSRTPEKGFSDREPTRPPRPILQRQDDIVQEKRLSRGISHASSSIVSLARSHVSSNGGGGGSNEHPLEMPICAFQLPDLTVYNEDFRSFIERDLIEQSMLVALEQAGRLNWWVSVDPTSQRLLPLATTGDGNCLLHAASLGMWGFHDRDLMLRKALYALMEKGVEKEALKRRWRWQQTQQNKESGLVYTEDEWQKEWNELIKLASSEPRMHLGTNGANCGGVESSEEPVYESLEEFHVFVLAHVLRRPIVVVADTMLRDSGGEAFAPIPFGGIYLPLEVPASQCHRSPLVLAYDQAHFSALVSMEQKENTKEQAVIPLTDSEYKLLPLHFAVDPGKGWEWGKDDSDNVRLASVILSLEVKLHLLHSYMNVKWIPLSSDAQAPLAQ

SEQ ID NO: 417 - protein, 1106 aa, Artificial Sequence
  Description of Artificial Sequence: Synthetic polypeptide
MEDAKNIKKGPAPFYPLEDGTAGEQLHKAMKRYALVPGTIAFTDAHIEVDITYAEYFEMSVRLAEAMKRYGLNTNHRIVVCSENSLQFFMPVLGALFIGVAVAPANDIYNERELLNSMGISQPTVVFVSKKGLQKILNVQKKLPIIQKIIIMDSKTDYQGFQSMYTFVTSHLPPGFNEYDFVPESFDRDKTIALIMNSSGSTGLPKGVALPHRTACVRFSHARDPIFGNQIIPDTAILSVVPFHHGFGMFTTLGYLICGFRVVLMYRFEEELFLRSLQDYKIQSALLVPTLFSFFAKSTLIDKYDLSNLHEIASGGAPLSKEVGEAVAKRFHLPGIRQGYGLTETTSAILITPEGDDKPGAVGKVVPFFEAKVVDLDTGKTLGVNQRGELCVRGPMIMSGYVNNPEATNALIDKDGWLHSGDIAYWDEDEHFFIVDRLKSLIKYKGYQVAPAELESILLQHPNIFDAGVAGLPDDDAGELPAAVVVLEHGKTMTEKEIVDYVASQVTTAKKLRGGVVFVDEVPKGLTGKLDARKIREILIKAKKGGKIAVTRLKGSGATNFSLLKQAGDVEENPGPRSGTGSSGEVQLQESGGGLVQPGGSLRLSCTASGVTISALNAMAMGWYRQAPGERRVMVAAVSERGNAMYRESVQGRFTVTRDFTNKMVSLQMDNLKPEDTAVYYCHVLEDRVDSFHDYWGQGTQVTVSSGAPGSGPPSFSEGSGGSRTPEKGFSDREPTRPPRPILQRQDDIVQEKRLSRGISHASSSIVSLARSHVSSNGGGGGSNEHPLEMPICAFQLPDLTVYNEDFRSFIERDLIEQSMLVALEQAGRLNWWVSVDPTSQRLLPLATTGDGNCLLHAASLGMWGFHDRDLMLRKALYALMEKGVEKEALKRRWRWQQTQQNKESGLVYTEDEWQKEWNELIKLASSEPRMHLGTNGANCGGVESSEEPVYESLEEFHVFVLAHVLRRPIVVVADTMLRDSGGEAFAPIPFGGIYLPLEVPASQCHRSPLVLAYDQAHFSALVSMEQKENTKEQAVIPLTDSEYKLLPLHFAVDPGKGWEWGKDDSDNVRLASVILSLEVKLHLLHSYMNVKWIPLSSDAQAPLAQ

SEQ ID NO: 418 - protein, 530 aa, Homo sapiens
MEDDSLYLGGEWQFNHFSKLTSSRPDAAFAEIQRTSLPEKSPLSCETRVDLCDDLAPVARQLAPREKLPLSSRRPAAVGAGLQNMGNTCYVNASLQCLTYTPPLANYMLSREHSQTCHRHKGCMLCTMQAHITRALHNPGHVIQPSQALAAGFHRGKQEDAHEFLMFTVDAMKKACLPGHKQVDHHSKDTTLIHQIFGGYWRSQIKCLHCHGISDTFDPYLDIALDIQAAQSVQQALEQLVKPEELNGENAYHCGVCLQRAPASKTLTLHTSAKVLILVLKRFSDVTGNKIAKNVQYPECLDMQPYMSQQNTGPLVYVLYAVLVHAGWSCHNGHYFSYVKAQEGQWYKMDDAEVTASSITSVLSQQAYVLFYIQKSEWERHSESVSRGREPRALGAEDTDRRATQGELKRDHPCLQAPELDEHLVERATQESTLDHWKFLQEQNKTKPEFNVRKVEGTLPPDVLVIHQSKYKCGMKNHHPEQQSSLLKLSSTTPTHQESMNTGTLASLRGRARRSKGKNKHSKRALLVCQ

SEQ ID NO: 419 - protein, 483 aa, Homo sapiens
KAPVGLKNVGNTCWFSAVIQSLFNLLEFRRLVLNYKPPSNAQDLPRNQKEHRNLPFMRELRYLFALLVGTKRKYVDPSRAVEILKDAFKSNDSQQQDVSEFTHKLLDWLEDAFQMKAEEETDEEKPKNPMVELFYGRFLAVGVLEGKKFENTEMFGQYPLQVNGFKDLHECLEAAMIEGEIESLHSENSGKSGQEHWFTELPPVLTFELSRFEFNQALGRPEKIHNKLEFPQVLYLDRYMHRNREITRIKREEIKRLKDYLTVLQQRLERYLSYGSGPKRFPLVDVLQYALEFASSKPVCTSPVDDIDASSPPSGSIPSQTLPSTTEQQGALSSELPSTSPSSVAAISSRSVIHKPFTQSRIPPDLPMHPAPRHITEEELSVLESCLHRWRTEIENDTRDLQESISRIHRTIELMYSDKSMIQVPYRLHAVLVHEGQANAGHYWAYIFDHRESRWMKYNDIAVTKSSWEELVRDSFGGYRNAS

What is claimed is:

1. A fusion protein comprising:
a. an effector domain comprising a catalytic domain of a deubiquitinase, or a functional fragment or functional variant thereof; and
b. a targeting domain comprising a targeting moiety that specifically binds a mitochondrial protein.

2. The fusion protein of claim 1, wherein said deubiquitinase is a cysteine protease or a metalloprotease.

3. The fusion protein of claim 2, wherein said deubiquitinase is a cysteine protease.

4. The fusion protein of claim 3, wherein said cysteine protease is a ubiquitin-specific protease (USP), a ubiquitin C-terminal hydrolase (UCH), a Machado-Josephin domain protease (MJD), an ovarian tumour protease (OTU), a MINDY protease, or a ZUFSP protease.

5. The fusion protein of claim 4, wherein said cysteine protease is a USP.

6. The fusion protein of claim 5, wherein said USP is USP1, USP2, USP3, USP4, USP5, USP6, USP7, USP8, USP9X, USP9Y, USP10, USP11, USP12, USP13, USP14, USP15, USP16, USP17, USP17L2, USP17L3, USP17L4, USP17L5, USP17L7, USP17L8, USP18, USP19, USP20, USP21, USP22, USP23, USP24, USP25, USP26, USP27X, USP28, USP29, USP30, USP31, USP32, USP33, USP34, USP35, USP36, USP37, USP38, USP39, USP40, USP41, USP42, USP43, USP44, USP45, or USP46.

7. The fusion protein of claim 4, wherein said cysteine protease is a UCH.

8. The fusion protein of claim 7, wherein said UCH is BAP1, UCHL1, UCHL3, or UCHL5.

9. The fusion protein of claim 4, wherein said cysteine protease is a MJD.

10. The fusion protein of claim 9, wherein said MJD is ATXN3 or ATXN3L.

11. The fusion protein of claim 4, wherein said cysteine protease is a OTU.

12. The fusion protein of claim 11, wherein said OTU is OTUB1 or OTUB2.

13. The fusion protein of claim 4, wherein said cysteine protease is a MINDY.

14. The fusion protein of claim 13, wherein said MINDY is MINDY1, MINDY2, MINDY3, or MINDY4.

15. The fusion protein of claim 4, wherein said cysteine protease is a ZUFSP.

16. The fusion protein of claim 15, wherein said ZUFSP is ZUP1.

17. The fusion protein of claim 2, wherein said deubiquitinase is a metalloprotease.

18. The fusion protein of claim 17, wherein said metalloprotease is a Jab1/Mov34/Mpr1 Pad1 N-terminal+ (MPN+) (JAMM) domain protease.

19. The fusion protein of any one of the preceding claims, wherein said deubiquitinase comprises an amino acid sequence at least 80%, 81%, 82%, 83%, 84%, 85%, 86%, 87%, 88%, 89%, 90%, 91%, 92%, 93%, 94%, 95%, 96%, 97%, 98%, 99%, or 100% identical to the amino acid sequence of any one of SEQ ID NOS: 1-112.

20. The fusion protein of any one of the preceding claims, wherein said catalytic domain comprises a catalytic domain derived from a deubiquitinase at least 80%, 81%, 82%, 83%, 84%, 85%, 86%, 87%, 88%, 89%, 90%, 91%, 92%, 93%, 94%, 95%, 96%, 97%, 98%, 99%, or 100% identical to the amino acid sequence of any one of SEQ ID NOS: 1-112.

21. The fusion protein of any one of the preceding claims, wherein said catalytic domain comprises an amino acid sequence at least 80%, 81%, 82%, 83%, 84%, 85%, 86%, 87%, 88%, 89%, 90%, 91%, 92%, 93%, 94%, 95%, 96%, 97%, 98%, 99%, or 100% identical to the amino acid sequence of any one of SEQ ID NOS: 113-220 or 270.

22. The fusion protein of any one of the preceding claims, wherein said catalytic domain comprises an amino acid sequence at least 80%, 81%, 82%, 83%, 84%, 85%, 86%, 87%, 88%, 89%, 90%, 91%, 92%, 93%, 94%, 95%, 96%, 97%, 98%, 99%, or 100% identical to the amino acid sequence of SEQ ID NO: 270.

23. The fusion protein of any one of the preceding claims, wherein said moiety that specifically binds a mitochondrial protein comprises an antibody, or functional fragment or functional variant thereof.

24. The fusion protein of claim 23, wherein said antibody, or functional fragment or functional variant thereof, comprises a full-length antibody, a single chain variable fragment (scFv), a scFv2, a scFv-Fc, a Fab, a Fab′, a F(ab′)2, a F(v), a VHH, or a (VHH)₂.

25. The fusion protein of claim 24, wherein said antibody, or functional fragment or functional variant thereof, comprises a VHH or a (VHH)₂.

26. The fusion protein of any one of the preceding claims, wherein the mitochondrial protein is dynamin-like 120 kDa protein (OPA1), protoporphyrinogen oxidase (PPOX), frataxin (FXN), DNA polymerase subunit gamma-1 (POLG), cytochrome c oxidase subunit 6A2, mitochondrial (COX6A2), ubiquinol-cytochrome-c reductase complex assembly factor 2 (UQCC2), or complex III assembly factor LYRM7 (LYRM7).

27. The fusion protein of any one of the preceding claims, wherein the mitochondrial protein comprises an amino acid sequence at least 90%, 91%, 92%, 93%, 94%, 95%, 96%, 97%, 98%, 99%, or 100% identical to the amino acid sequence of any one of SEQ ID NOS: 221-224 or 271-273.

28. The fusion protein of any one of the preceding claims, wherein said effector domain is directly operably connected to said targeting domain.

29. The fusion protein of any one of claims 1-27, wherein said effector domain is indirectly operably connected to said targeting domain.

30. The fusion protein of claim 29, wherein said effector domain is indirectly operably connected to said targeting domain via a peptide linker.

31. The fusion protein of claim 30, wherein said effector domain is indirectly operably connected to said targeting domain via a peptide linker of sufficient length such that said effector domain and said targeting domain can simultaneous bind the respective target proteins.

32. The fusion protein of claim 30 or 31, wherein said peptide linker comprises the amino acid sequence of any one of SEQ ID NOS: 279-406, or the amino acid sequence of any one of SEQ ID NOS: 279-406 comprising 1, 2, or 3 amino acid modifications.

33. The fusion protein of claim 32, wherein said peptide linker comprises the amino acid sequence of any one of SEQ ID NOS: 279-288, or the amino acid sequence of any one of SEQ ID NOS: 279-288 comprising 1, 2, or 3 amino acid modifications.

34. The fusion protein of any one of the preceding claims, wherein said effector domain is operably connected either directly or indirectly to the C terminus of said targeting domain.

35. The fusion protein of any one of claims 1-33, wherein said effector moiety is operably connected either directly or indirectly to the N terminus of said targeting domain.

36. A nucleic acid molecule encoding the fusion protein of any one of claims 1-35.

37. The nucleic acid molecule of claim 36, wherein the nucleic acid molecule is a DNA molecule.

38. The nucleic acid molecule of claim 36, wherein the nucleic acid molecule is an RNA molecule.

39. A vector comprising the nucleic acid molecule of any one of claims 36-38.

40. The vector of claim 39, wherein the vector is a plasmid or a viral vector.

41. A viral particle comprising the nucleic acid of any one of claims 36-38.

42. An in vitro cell or population of cells comprising the fusion protein of any one of claims 1-35, the nucleic acid molecule of any one of claims 36-38, or the vector of any one of claims 39-40.

43. A pharmaceutical composition comprising the fusion protein of any one of claims 1-35, the nucleic acid molecule of any one of claims 36-38, the vector of any one of claims 39-40, or the viral particle of claim 41, and an excipient.

44. A method of making the fusion protein of any one of claims 1-35, comprising
a. introducing into an in vitro cell or population of cells the nucleic acid molecule of any one of claims 36-38, the vector of any one of claims 39-40, the viral particle of claim 41;
b. culturing the cell or population of cells in a culture medium under conditions suitable for expression of the fusion protein,
c. isolating the fusion protein from the culture medium, and
d. optionally purifying the fusion protein.

45. A method of treating or preventing a disease in a subject comprising administering the fusion protein of any one of claims 1-35, the nucleic acid molecule of any one of claims 36-38, the vector of any one of claims 39-40, the viral particle of claim 41, or the pharmaceutical composition of claim 43, to a subject in need thereof.

46. The method of claim 45, wherein the subject is human.

47. The method of claim 45 or 46, wherein the disease is associated with decreased expression of a functional version of the mitochondrial protein relative to a non-diseased control.

48. The method of any one of claims 45-47, wherein the disease is associated with decreased stability of a functional version of the mitochondrial protein relative to a non-diseased control.

49. The method of any one of claims 45-48, wherein the disease is associated with increased ubiquitination of the nuclear protein relative to a non-diseased control.

50. The method of any one of claims 45-49, wherein the disease is associated with increased ubiquitination and degradation of the mitochondrial protein relative to a non-diseased control.

51. The method of any one of claims 45-50, wherein the disease is a genetic disease.

52. The method of any one of claims 45-51, wherein the disease is selected from the group consisting of optic atrophy 1, Porphyria variegata, Friedreich's Ataxia, Alpers Syndrome mitochondrial complex IV deficiency nuclear type 18 (MC4DN18), mitochondrial complex III deficiency nuclear 7 (MC3DN7), mitochondrial complex III deficiency nuclear 8 (MC3DN8).

53. The method of any one of claims 45-52, wherein
a. said target mitochondrial protein is OPA1, and said disease is Optic atrophy 1;
b. said target mitochondrial protein is PPOX, and said disease is Porphyria variegata;
c. said target mitochondrial protein is FXN, and said disease is Friedreich's Ataxia;
d. said target mitochondrial protein is POLG, and said disease is Alpers Syndrome;
e. said target mitochondrial protein is COX6A2, and said disease is mitochondrial complex IV deficiency nuclear type 18 (MC4DN18);
f. said target mitochondrial protein is UQCC2, and said disease is mitochondrial complex III deficiency nuclear 7 (MC3DN7); or
g. said target mitochondrial protein is LYRM7, and said disease is mitochondrial complex III deficiency nuclear 8 (MC3DN8).

54. The method of any one of claims 45-53, wherein the disease is a haploinsufficiency disease.

55. The method of any one of claims 45-54, wherein the fusion protein is administered at a therapeutically effective dose.

56. The method of any one of claims 45-55, wherein the fusion protein is administered systematically or locally.

57. The method of any one of claims 45-56, wherein the fusion protein is administered intravenously, subcutaneously, or intramuscularly.

58. The fusion protein of any one of claims 1-35, the polynucleotide of claim 36, the DNA of claim 37, the RNA of claim 38, the vector of any one of claims 39-40, the viral particle of claim 41, or the pharmaceutical composition of claim 43 for use as a medicament.

59. The fusion protein of any one of claims 1-35, the polynucleotide of claim 36, the DNA of claim 37, the RNA of claim 38, the vector of any one of claims 39-40, the viral particle of claim 41, or the pharmaceutical composition of claim 43 for use in treating or inhibiting a genetic disorder.
